United States Patent Application Publication US 2026/0256770 A1, published September 3, 2026 (application 18/717,540).

The application's sequence listing, which the Patent Office published only in electronic form, follows.

SEQUENCE LISTING (13 sequences)

SEQ ID NO: 1 - protein, 2871 aa, Homo sapiens
MRRGRLLEIALGFTVLLASYTSHGADANLEAGNVKETRASRAKRRGGGGHDALKGPNVCGSRYNAYCCPGWKTLPGGNQCIVPICRHSCGDGFCSRPNMCTCPSGQIAPSCGSRSIQHCNIRCMNGGSCSDDHCLCQKGYIGTHCGQPVCESGCLNGGRCVAPNRCACTYGFTGPQCERDYRTGPCFTVISNQMCQGQLSGIVCTKTLCCATVGRAWGHPCEMCPAQPHPCRRGFIPNIRTGACQDVDECQAIPGLCQGGNCINTVGSFECKCPAGHKLNEVSQKCEDIDECSTIPGICEGGECTNTVSSYFCKCPPGFYTSPDGTRCIDVRPGYCYTALTNGRCSNQLPQSITKMQCCCDAGRCWSPGVTVAPEMCPIRATEDFNKLCSVPMVIPGRPEYPPPPLGPIPPVLPVPPGFPPGPQIPVPRPPVEYLYPSREPPRVLPVNVTDYCQLVRYLCQNGRCIPTPGSYRCECNKGFQLDLRGECIDVDECEKNPCAGGECINNQGSYTCQCRAGYQSTLTRTECRDIDECLQNGRICNNGRCINTDGSFHCVCNAGFHVTRDGKNCEDMDECSIRNMCLNGMCINEDGSFKCICKPGFQLASDGRYCKDINECETPGICMNGRCVNTDGSYRCECFPGLAVGLDGRVCVDTHMRSTCYGGYKRGQCIKPLFGAVTKSECCCASTEYAFGEPCQPCPAQNSAEYQALCSSGPGMTSAGSDINECALDPDICPNGICENLRGTYKCICNSGYEVDSTGKNCVDINECVLNSLLCDNGQCRNTPGSFVCTCPKGFIYKPDLKTCEDIDECESSPCINGVCKNSPGSFICECSSESTLDPTKTICIETIKGTCWQTVIDGRCEININGATLKSQCCSSLGAAWGSPCTLCQVDPICGKGYSRIKGTQCEDIDECEVFPGVCKNGLCVNTRGSFKCQCPSGMTLDATGRICLDIRLETCFLRYEDEECTLPIAGRHRMDACCCSVGAAWGTEECEECPMRNTPEYEELCPRGPGFATKEITNGKPFFKDINECKMIPSLCTHGKCRNTIGSFKCRCDSGFALDSEERNCTDIDECRISPDLCGRGQCVNTPGDFECKCDEGYESGFMMMKNCMDIDECQRDPLLCRGGVCHNTEGSYRCECPPGHQLSPNISACIDINECELSAHLCPNGRCVNLIGKYQCACNPGYHSTPDRLFCVDIDECSIMNGGCETFCTNSEGSYECSCQPGFALMPDQRSCTDIDECEDNPNICDGGQCTNIPGEYRCLCYDGFMASEDMKTCVDVNECDLNPNICLSGTCENTKGSFICHCDMGYSGKKGKTGCTDINECEIGAHNCGKHAVCTNTAGSFKCSCSPGWIGDGIKCTDLDECSNGTHMCSQHADCKNTMGSYRCLCKEGYTGDGFTCTDLDECSENLNLCGNGQCLNAPGGYRCECDMGFVPSADGKACEDIDECSLPNICVFGTCHNLPGLFRCECEIGYELDRSGGNCTDVNECLDPTTCISGNCVNTPGSYICDCPPDFELNPTRVGCVDTRSGNCYLDIRPRGDNGDTACSNEIGVGVSKASCCCSLGKAWGTPCEMCPAVNTSEYKILCPGGEGFRPNPITVILEDIDECQELPGLCQGGKCINTFGSFQCRCPTGYYLNEDTRVCDDVNECETPGICGPGTCYNTVGNYTCICPPDYMQVNGGNNCMDMRRSLCYRNYYADNQTCDGELLFNMTKKMCCCSYNIGRAWNKPCEQCPIPSTDEFATLCGSQRPGFVIDIYTGLPVDIDECREIPGVCENGVCINMVGSFRCECPVGFFYNDKLLVCEDIDECQNGPVCQRNAECINTAGSYRCDCKPGYRFTSTGQCNDRNECQEIPNICSHGQCIDTVGSFYCLCHTGFKTNDDQTMCLDINECERDACGNGTCRNTIGSFNCRCNHGFILSHNNDCIDVDECASGNGNLCRNGQCINTVGSFQCQCNEGYEVAPDGRTCVDINECLLEPRKCAPGTCQNLDGSYRCICPPGYSLQNEKCEDIDECVEEPEICALGTCSNTEGSFKCLCPEGFSLSSSGRRCQDLRMSYCYAKFEGGKCSSPKSRNHSKQECCCALKGEGWGDPCELCPTEPDEAFRQICPYGSGIIVGPDDSAVDMDECKEPDVCKHGQCINTDGSYRCECPFGYILAGNECVDTDECSVGNPCGNGTCKNVIGGFECTCEEGFEPGPMMTCEDINECAQNPLLCAFRCVNTYGSYECKCPVGYVLREDRRMCKDEDECEEGKHDCTEKQMECKNLIGTYMCICGPGYQRRPDGEGCVDENECQTKPGICENGRCLNTRGSYTCECNDGFTASPNQDECLDNREGYCFTEVLQNMCQIGSSNRNPVTKSECCCDGGRGWGPHCEICPFQGTVAFKKLCPHGRGFMTNGADIDECKVIHDVCRNGECVNDRGSYHCICKTGYTPDITGTSCVDLNECNQAPKPCNFICKNTEGSYQCSCPKGYILQEDGRSCKDLDECATKQHNCQFLCVNTIGGFTCKCPPGFTQHHTSCIDNNECTSDINLCGSKGICQNTPGSFTCECQRGFSLDQTGSSCEDVDECEGNHRCQHGCQNIIGGYRCSCPQGYLQHYQWNQCVDENECLSAHICGGASCHNTLGSYKCMCPAGFQYEQFSGGCQDINECGSAQAPCSYGCSNTEGGYLCGCPPGYFRIGQGHCVSGMGMGRGNPEPPVSGEMDDNSLSPEACYECKINGYPKRGRKRRSTNETDASNIEDQSETEANVSLASWDVEKTAIFAFNISHVSNKVRILELLPALTTLTNHNRYLIESGNEDGFFKINQKEGISYLHFTKKKPVAGTYSLQISSTPLYKKKELNQLEDKYDKDYLSGELGDNLKMKIQVLLH

SEQ ID NO: 2 - DNA, 237483 bp, Homo sapiens
  source 1..237483: mol_type = genomic DNA
agtatttctctcgcgagaaaccgctgcgcggacgatacttgaagaggtggggaaaggagggggctgcgggagccgcggcagagactgtgggtgccacaagcggacaggagccacagctgggacagctgcgagcggagccgagcagtggctgtagcggccacgactgggagcagccgccgccgcctcctcgggagtcggagccgccgcttctccagtgggtgcagccggggtcccgacgggggtcgggcggccaccggggctggagctgcggccacggaggcttttgcgtttgcgccgcgccgagggcagggacagggactggggtgaggggctgtcccggaacgtccacagctggcgctggccctcccctgcctgacagcttcctggcccggggctcttggtgccgggctccgcgtcagatgttcggggggcggtggcatcgcccggagtcggcggggacggcgcggctggcttccagcctggcggagagggcaggctgaggagtggggcgttcagagcgcgcatcgcgcgcaattcgtgccgctaaaaaaaataaacccagagagctcgcccggggcttaggaccgctggggatatgggtactttgcgccgcgctcttctggcggggcccgggaggccgagggatcggccggggctgctgccgccgggggcctgggctttccagccagctgtggaccaaacggtcttcccttacccaaattaactgcgccacgcgcaggcggcgcacgggttgggcttgggaatggggaccgcgaggcttcagcatcccgatgccctgaaagtctccccgcctcggggatttgtctctgtgttgcagctggcaggggccgcctgaagtgggagcagcgcctggagaaggcgggaggagcccggcccgggggacgggcggcgggatagcgggaccccggcggcgcggtgcgcttcagggcgcagcggcggccgcagaccgagccccgggcgcggcaagaggcggcgggagccggtggcggctcggcatcatgcgtcgagggcgtctgctggagatcgccctgggatttaccgtgcttttagcgtcctacacgagccatggggcggacgccaatttggaggctgggaacgtgaaggaaaccagagccagtcgggccaagagaagaggcggtggaggacacgacgcgcttaaagggtaaaggaaccggttccctcctttggtgtgggtctcccaagtttcaagatccagaacaacgggcaggatgactctccctgtggaagactccttggcaagacctcctgggggcaccttagaggtgctagggttgtttagtccccaccccgttcgtggttaaactaccttgcccctactcccagagatttctgccccaaaggagaggacgtggttaaatggaatcttgggccattgttgaggcagattttgggaggcgagaagagttccttggggaagaaggggaggagttgcgagtgggataagaggagaagcccgttcctttccctgcaatatcaattctggttgtttctagaggaaagtactttccttggggtcatcttggtagatgctgtatttgaaagggggcaaggaaaggaagggattcccatgacagtcagaggagaaatcacacagtagttgactcttccgtaaattatgcttattaaaattacggattgggttttctgggcaatgcttcctttagatgtctacattggaagcagaacagggcaagtggttctgagaactggttttttgagttgtgtggggctctccgtttcactgcagcagtaaggctgctgtggccggccttaagggagtatttttaactagtggtgtttgtgttgtgtacatgcaactgaccatttcactggcttcccatgccgctgttacagatgtttcagccggaaaaattttaattagacttgactaagggttgtcattttcctgtattgaaggacagtgggaatacatttcctttaagagaaatttgtctgcagttgtttaagttaaagcctccatggaaacaacaggatggactgtcagtgaccccttttatcttcttggaggagcctgttaaataaattcagacagtatatatagggagattttgtattaaattcttaccattctcgctgatgctcttttcctgagtggttctgtagctttattatatagctctgggtcaccaagtgatggtatccacttggatatgtggctgttcatttcacttactctttttttgttatgaggtgttatagtcatgtatatgtagtaaaatttgtgtttgtatggcccagatatgagaagaaaaagtaaactcaccagaccagtttttgactcctagtctggagtaaggacaagatgattgtatgagccaagcacttaggctgtgataaaatagcacagaaaatagttatgattaattcggttccatcttggccttcgtggaaaataaacccagaattccgataatgttggaaggaagtttgcttatcatggtaaacctgaccttgatcagacagcagatgtttattgccctgtgtgcaaggcacatggcaagttcaataagtagactgaggctctgattttcatatgttctcaagaggacctcatttagtccagtatttttccttcaaaaatacatttctcctacataataatatcttaatatctattctgataggattgctcctgtatataaaggacgtggggatttaattctgtggctgaagatctgcagagaggtgtgaggcctggtcagacatttgtctcatttctctgggctgtcaccaactagtgtgttcccttgggaatgtgaaaaaagaaactaagctttactttgttgcttaacaggatgccacacttttactcacacttgtgctttttctctctggttttaaatttgtttgtgattatagagagatacctctctgtgctcctcacagtatttgatcattaacacagaccttatcctattgtaaactatttataaagccttcctaaaaacagggtattaatagaattgtaattatgtgtgttcctaattctcatgttaattataagattttataataagtgatatatatatatacacacacacacacacacacacatacacgggggtgaaaataataatttaaaaatatatacaattaaaagtatttccctgccacctttcagagaccattttcttgtgtatttttctataaatcttttaggcatatgtatacatgtacaaataaacacaaatatatatgtatacatacacatgtgtgtgtgtatcctttttaatacatggaatgtattgtacatgcaatattctgaactttacttactttttatgtatctttaatgcatccatctattaactcatatggatctacctcattcattttctttctttttttttgagacacagtcttgctctgttgcccaggctggagtgtagtggtgcaatcttggcttactgcctccaccttcccggctcaagcgattctcctgcctcagcctccagagtagctgggattacaggtgggtgccaccaagcccggctaattttttgtatttttagtagagatggggtttcgccatgttggccaggatggtctcaaactcttggcctcaagcgatccacccacctctgcctctccaaattacaggcttgagccactgcgccctaccccattttcttgttgtatagaacctcattatgtcactggaacagttccctagtgatggctctttagattacattgagtcttttgctattaccaactttcttctgcatacctgtgtttacatacacgtgtttatatgtggtataaattagtaaaaatagaattgctggatcaaagtctttcccatagattttaagcaaaccccaattcttatgttaaatttgaataacattttaaatttattccctctgcttattgccgttacagtctcatatgaataaatcctttaacggtgccctgctgtataaatcatcagaaaaagcagttatgtactacatttttccagttattgcttaaaatttctgtttttgtctgttaaaatattaccggcttcaaaactcacctctttgactacagtgaaacctgtttaccattctgattggagatgcacagtttatgaagtgaaagtgatttgtaacccccgagtctgcctgatgcccagttggtggcagcaactttcagcacctcactaatctttcctctagttaaaaggtaccttaaactcatcagtatctgctgtgcactggttccttctccccagcaaatactgccttcttgtttttctctgatgtggcaggtgactacaaaatccgccttggtattcttcaaatgcatatatattcctttcttgtcagctccctctcttcctagattagaaaactgcctcattttctgctcactggatgtgcagtcccagcttgtcttcctctcctccccccctgttgcaggtgttcttttttttttttattctctccccactgggcagcaaaagttgttccacagtggaaatttaggcatcctcaagtttcttcccagcttctgctgtgttttcttagagtaaattgccaatttctgtttttacaggaaatccttttttaaaaatggaatcagtgtggtccccatctactctgcaaaaattgcatttttctctattttcaaatgagatttgttcaagtttcaaaaccacgtgaaataataaatgtatagtagttttcttttccttgggcattgcttgatatgtgaaatgggtttatgaaaaataataaaatcataacgctatttgtttgactttcaattcatgggaatttttctcagctaaactctaaatggtgattaggcaaaaagtgtgggagacagtccaaaaaaaaaaaactcaactgtacttgaatagcaatagttatgcaccatttatttatgattgccttattgctttagctcccaagtaaggaaatattactgtttcctgtcaaagggggaaaagttcttcacagtgagatctcctttcccaaaccttggagaagatggattgagacttctgcccttgttgtgtggtttataggtacatgagaccagttgtatttgacacaatttgtccccttgtgtgtgattccttttggtctttgtttatttgtttatttttttccagaggtcttgttgccagaaaaatacacatggaacagttcatacccatggtagattatgtgatggcaaactccaagggattagttatgtagaagtctgttattaaaataaagaactgtaatagggaatacagaaaaagttctgtagactttataaagtccattttactttataaaggggactttaagacttcacctgaagtcagatgggctaataattaaatatggggaaagactcctgcaggggtatggtttacatttattgaaaagattaagctaaaatattgggacacaatttttttttaaaaaaggatatagtgttcttaaatagaagatttcagcaattccacacatgaaacaagaaggtagagacaaaatatttatttatgtgactcattttgtaacattgaagacatagaggttgtttataaaaatgtgtaagttggtaatacaaattaattaaaacatacatcagcctatggtgaaatgagatgagagctgatggaaatggagtacagacttcccttcaaccttatttggaattttaaagaatattaaaatgttcctttatcgtcttgtgtagcatatactttaaaaattatagtattatactgatgactctaatcaagcaaaatactaaaaaattattagagtattcatgtaccagtttgttggctttttcttccagtaagccaatcagcctaaccactttgggagttttagctttattttcaatgtgaaaataagattttacaaatgttttcttgaaagagaaatacattcttttaacaatttctttgtttttaaacatgaacccagcaaatgggcctgcttaagcaacttagaattttttcccatgagattctttgaagaaaccgacatcaataatatatcaggcctgagttatgtggcctaactcaggcacatgatagtttagcgtttcatgattgttcaagtcgattttctcattagatagttaaatcattgaagacaagaatcctattataagcattttaccactaactcatcattaagtggggtttcagaaagttcattaattcaggaagtcttgattgaatgctagcttgagtttagttctgtggaaggccagagacatataccccataaccctgggggtacttcaggaaccgtgagtgcacagaaggacagcgtccctggaaagggggtctggtattaagtctaaacaaatacataataacaattgcagccatggtaggtaacatttaggtaacatctatatgttactaagcactatatgttgctaagcactgttcttactgttttgcatatgataattcattgaatcctcatagccactctacaagctgggtgctttcataagcttcccttcacagatgtgagagccgaggtatgcagaggttaagttctaaagacaaaacttaacgttaacttttctttctccattaattttagttatggttttggtttttcattccaccagacaaaaatgcaggcccaagacattggtaaaattccacttaaaattcctaatattctttcatgctagttcacaaatcctaagtatggttaatcacacagtattatttagtccaacaagaaactttctgcaaagacattaataaaacagaaagaatcataggatgttagagccagtgggactttggacagcgtattatattttaatattagaccttgacttgtgtgagggtggtaggtaaccattgcaggcagcctgctgggcgttgtgtgggcttctgagctggaggcattgctgtttatgttgttcagaaccctcttgctgtcatgtcccctgtgagaaatctctctgaatagggttgcaagaagtatttctctttccagtggaaattggtatgtgtcttaaatcacgaccagtcatatgagttatttaattatttctttttcattttttaaccttggttgcctgtaaactcagcccaattttttacattaaattgcagccataatggtaaaaaaaaaaaaaaaaagctctgatgtatcacttatgattgtactttgcaaatactaattcctttaaaacataaatcctttatgaggaaaattaagcttatttattcatttaacaaatgaagaaacaagggatgcagagtttcagtaattactccagggacataaactagtaagtggtagagttggaaaatctagcttcatagctggagctcttaatcttaatattttactgctttacagttataataaatcttgtagctggtaaatttttttctttcataccttttataccttcgtttcccaagaatcttctcccaccattgctatgtggaaagactcaacatttattgatggcagatgctgttacaagccaagggaagcatcattgtgggaatgggattgatcagaagtgactttacagtgaaagtctattagggctgggcatggtggctcattcctgtaatcccagtgctttgggaggctgaggcaggaggatcacttgagcccagagggttgaggctgcagtgagctatgatcatgccactgcactctagcctgggcgacagaacaagatcctgtcttaaaaaaaaaaaaaaagtttatcagtggtcaacaaactgaagaccaagctcactttttttgaaaatagagttttattgaaacaaatccatgcctgtttatttacttattatgtatggctgctttctccctacagcagcagagtggagtagttgcaacagagacagtatggcccataaaactgaaacatttgctctttggtcctttacagaaaaagtttaacaacctctgatctacgtgataaaaagtgactgtctactaggagtgagaactccttgaaggcagagatcttgcttgttttatttatctctaggaacatctaggaactgggtatgcggcacatgttcaatagaatagtttttgatagttgaactctgagcaattttgatgagctgattaactgggtatggttaattatatagactagagcttggagtaagtatagctgagaaataaaggaaagatgagtgaaaaatacatcaagggaaagggatatgaagtgtctgaggtcttaggacattgactgcagttgggcagggttggcacggcatggttccaagtgacatggtttgtagtgcagtctatgaaacgagtgccctctggagctgtgcagtttgcaaccttgagcaatcttgtgagcccgtacataggtggcaatgttgttagggaaaggagagggactagtggaaatataaatgtcactgatgttgtgaaaggcaaggacggggagctagtaaaggattctaagataggaacatgatcagatctttgccactgggtagaggtgtgaagggtagatgattagagagaagagagactaaagacagggagatttggatttaggaggctaatataggagtcacagtgagagtccacgatggtctgagcaaattcagtgaaaggggtgaagaaagaagagactcaggtggttccagagttaatgcagacagtacttgactagttggttgtgaaagacaaaggcgaggaggacctagaatgctcccacctccatatatattcaaacttaccatacacgaagtcattgtagcaccataaagagaaaataaagggaaacgagatcaggcctaggccctctactaccatgaaacaaagtattttcatttgtgagtgtttgagttattttattgctacgtaacaaattgccccagacttcgtggcttaaaacaacaattttattctttctcatgattctgtggctcaggaatttagacaggacacagtggggaatcttgtctctgcgccccacaatgtcagttgggctggaacaggcagtatgacttcttcacatatgcatctggttctgtgaccaggcactggcgcctgcagccctgtttacttgggtgtggtttatctaaatggacccactgaggaggggaataaaggaagcaaagagccacttgtctggctctgctgggggccttccaagttttaaagctgtctctcatgcagtctcctgcctgaacctgcccccgggatggagccattgaatgtgttttttttcaaatggggagactgagccccagatgcagcgactaggccttgctcagagtgagtgtctgttggggctggatcttgaacaacagcctcctgaccctggtcacatgtgttaatcccacatattgaccgtaggctaactcgaagggctgggggctggctggctggggtcacatggactcatatgtcctcgacattgcctggcttccttgattctcctttatatagtctcaggttgtcccctttctatacgtggcctctctacatggtctttagagcagcatagccagactttttccatggcagttcaggatctctcaagagcacaaaagtgggaactaccagactttcttcaaacttagcctggaatcgcatgacctggaattccatccaagtcataggcctcatccagattgaagggcatggactattaagacctacctttggatgtgaggagcatcatgtgtctgctgggaggggagaaagtggagccatctttggagaccagctaccactgtgaggcaatagatctttgagaaggctaatcagatactttaagttttaattctaacttgatcaagttcagttggcttagttctctactgaggatgcctcattgtattttgctgctgtaacttcagaatgaaaaagctccataaatattgtgtttgcatgttctgttagattcatgttagggcattgatcttagtttgtccacagttctgcatttaaagaactcacaactgtcaggaataaaatgaaagttcctaatgaagcagtatgttttgttttattcaaatatgagaatttcaaaacatctaaccattttccatttgcttttaagaaaatcagcttttaagattatacatgaaataaatttaatgggcaatcactctaatttattaactttggtatgttttaactttcttctgtatggaattttattttcaatttctatttatagcctcaaatgtatgtatctgttggtgtaatccacctcaattttttaaattaggggttatactaataagtaaaaataggttgcagttgctaatagaattggtgttgtaatgagctgaactgtactatttttcttataaatggagtagccacattatcaatagaataaaattggattaggaatatagtcaagtttgcattgtgggtgtcttatactatatcaaatcctagatttaaatttcttgtgactaccactttttcaacttaagtgacttttttttggttgaagttatcactgactctatttattcagctccctcagagcggaagagagaaagcaaaaatccctatctccaccattcccagccggagatgtattccagacagcaagcaggctcagagtgggagaactgctccattaaacaagtggtttagttcaacattttgaaggattatgaattcctagaccatcagtcatacttacattcaaatataagtatccaaacacatctaagtccaaatatagtacaaccattttatgatgttggtgttgggagacaggatttatgtctgccctaaagacacattgtctgctgtcaagtttcatggttttgaactgaagtatggtaatatctttattaataaagacaatgtattccagaggcagggtttcattttgtgtgtgtgtgtgtgtgtgtgtgtgtgtgtgtgtgtgtgtgtgtggttttttttttttttttttggtttcttcttcttccttttccggttctgtttctccttctttgttgccatcttttccttttcttctttttcttcatcatcattgtttcatcttctttttgtaagtaatttcataagctgtgctgcaaataaaatagggaggataggaatatcaaatgagagttaaaaccttaagaaaagtaaacaaggtctaagtaaaatacaaaatttttacctgggaacattggggtgttcaaaaagcaaaacagggttaaggtttttgttaggggaaggaaggagaaagcctgagggaagcaggaggagagagctgggagaaggttctggagtgaaagtcttgccagccagtggacctaggctggacagagcagatgctgggttttgaaagagattgatgacaaccccttcactcccggcagcattgggaccaggcgacctgtggccttaatcagcctcttttaggggacagagagcttatggaggagagtcaggacataaaagaaagacacttggatgccagaaaagattcgtatgaaaacatttagaggaatgcagtggaaaagcaggttaatccattgtctggtatgcacctgtgtatatggtactatgtaaagtttgatgcatcctgcttcttgtaactaatggtttattgtgtatcatttcccctgttcattcagtgctaatttgtaagattgtgtaatcagaccctaataggtttgggcctttgatgaataacttttaaaggaccttcttatttttaaatgcttttatttttgccattgaaattatggcttatatcttcttccatagccagaccatccatctttagaaaaattcatattataaattagttatagtaggacagattttagaaatgtataaatactgaaactgaggcccagagaaggtccaggaacaagtgctcaaggtgcttattttcctctccggttcgtaggtgtggaagctgagtcacgtggtagcgagagctgacctaagaggcgcgttgttgggtaatagattgggcctctttgtgttcacaccctcaagaggtggactggtatctgcaagttctctgctatacttgaaataaccaaaccttatcaatcctgtgggcatgggtgttttctttctctcatttatttgatcttaggcagtgtgattactctctcagcggtcagccctgaaggggtgatactgtagcagagttttagatcctcagtactaccctgctctcagtgggaacctccacattagaaaggattgggtgggatgggactttttgagggaggtagttgtcaatgagggtatcagtcaggtggttggaaaaagagaaatagtcttctccgggaatcggaagcatgactcctccccgcaaccctccaccacacacatactcacacttctaattggcagtcaaagagtcaaatgacctgggatcaactaaggcagttctgggtctgtgattaagcttggtttcttgttgtgtaacttgctggctcagttatccaaactatacattaagagtttatgtaataaacatgctaaagaaagaaaaaaattcttaaattcttgtgttttcctccatatcatctcacctagtaatactgtaaaacatctgcctactccaagtgacaactatgttatgagcattagctgcgtttgaataggacccaatgcttcattttcagaatgaacaccctgtcttgggcttgttgatattattatctttttttccaatgattctaggcagaactgccatttggaatatctttctctccctttctgatggggttaatgtctgaggagatgtaggcaaatgcttttcagtgaaggacttgatgtgcagcctttaagtagacaaatagttttttaatctttcatggactgctggtgcttcacaccccagagttgaggccactgacctcaagtttgcaaattttatatcccattaccaccctgtgagctctgtgctccccagggtcacatagtcggtgttttagctggaatctgagaaagtgcctgaacatttcctgaagagttggctaggaatgtttggcagtttggtcataaaaacccagagctagtggctggggtatatgttataattacctcacactatttcctatttgagcctggctgtgggtagtggggtatactggtattgattgtgggaccatattttaaaggaccaaggagtcattttcaatgatcactaataacctttggccacactttcagggaggtttggaagtgtggaaatagacatgctttgggtcaaaccctggctccaccaccttctaggaggaaacctcagacgagtgatttgacctctctgggcctcagtttcttcacttgtaaatgcgattaaattactcatctttctgtgttgtcctaagatttaatgggatggtacatttcaagttcttagtactatgcctgacatgtttagctatgatgatgagaatgattataatgctgttacagataaggaaaatgaggcagagagtcatccaaagaggctgttttttatggctaaagcaaaaatctagataatcatacctatctggataccacagtctccactttctcatcatagaaatgattatattaagaaacaggaggcaaacctgaattttaaaatgttcaaaagtgtaattttaatggacttactatatctgtggagatctggttatacttaaaggcagtttggggataagtttttatttttaaattttctctttccctaaattgtgttgtcttcattgggaaacaaacttactaaatattattccttattaatatgcaccccctcaactcttccaaaaaagtttgcattttttaactggcagatctgtcaaataggccttgcctctttcctgattagcacattttttaaaaagatactttgtgaaaagaatttaaattttagtaaatggaaagactgggttgaaaaccattctctttggcagcagtgcagagataccctgggagttagaattgtttcatggcaaggtggtgcgctattcttgaaatgtgctttaattgcctctgttggagtaaggatttggttataattgggtagcccagatgaccacctacaattcttagccacactgcctttcaacacataatctcagaggtaaagagataagccctcttttccagattgctcatgtcagatctcgcggagaactccagcactgccccagtcacacgcccttcactgtcgccaaagaaataggacactccagctggtcaggactgagccatgtgttagtcctgcctgaaccatgtggaatgggcttaggaaacgaagagtttggttagcagagaaggggaagggatactggatgggcaaacacaacacatctgcactcacagggagaaagctcccttttccatagcgtcagtattccctccacccactctgttatcactgtcctctctaggtgctttgtgggcaggccttgcttgcgtgattggggacaggctgactcagattggcagcccctgagaagagccactttctagttgagcgttcccttcctttggcttcatgccatgcagcaacataatgctcatttactacaaagagattcttatttgttcttcttcttctgtgtcctctttctcttgagaaattgaaaatctttttatttttaaattttctcttaatgatttccattttgattttaatgagagttgactttcggagaggtcttaaactattgaacatccgtgagagtggaacaaaacatacattatcttaatttaggcatagctttcgtagagttcctatacgctgcaccctacatgccagctctggttaactgattggcagtaaactctaagaagttgcggttgcttcatattcattcacagcctataaaaataagagtagagtgttttaaataaggaacgatttgaacagataatagttacttttctatttgccattgaaaatgttcaaattacttaatgtctctcatccccgtggggtaaatcacaccatcaccaacagaaagtttgtaaaaaagtaagaatataaaatcaaacaaatgaataccaggtactttcttttcttttcttttctttttttttttttttttttgagatggagtctcactctgtcatccaggctggagtgcagtggcacaatctcggctcactgcaaataccgggtattttctgtgctctaccgacttcctgggaaaaaaataaacctcaaataaaataaacttttccttttaaagttttgaaaacctttcaggtattttacaaagataggcaaaccactttttctccttttgcttgtaagcagttctaacttaatccagacattattgaactttgacagaagacagcagggtctaatttgactgcagactgactcatctgctcatttgcatttgggaccttccttgaaaataggttgtttgacacacattctcacacattgaaaggtcagaagacataccaggattctttgctaaatgatttcctccctccatttcatatttcccatgtccataagaattcttccacttatgcacagaaaaacccaaatttaacctttttatggacctgatacacaaaaaccccttcccccaaaacacatcttttgttaactgatgggtttatgtttgtcataaagaaagataaaatgtctttatgaaaatgaatcatgtcaaaaaggacctgtgatgcccaaggggatccatcccctggaccgacatgttaattgtttgcacaggtgtagtgaagtcatttgttcttggattcttcatctagtgaactgtaaccttatttagtagctggatacttagtaggaacactttggttagttcttgccactgatttaacatggtacacatgttgggattggactgttgtctcttaatgggggtcccctccctctcaggaatgttgagctgcgtaacagataaaggtggttcttcaagtgaacgaaaacagaaaacaaaagtgtggcatgatggcatgtaggagactgtggatatcaggatggactaggccaggtgctgctgcaaatttgtgttttttaaaaagaattttatttaacacagatgtggataatttcaaaactagcaagaaggatacaatgatgatccagcttcagcatttatcaattaatggtcaatcttgttttatctacttcttctctccctcattgcatttattttgaagtaaatccttgaaaaatcattttacttttaaatatttcaatgtgtgtcctaaaagataagggccctttaagaaacataaacacaataacattattctgtttaccattaacactaattttctaatattatcaaatattcagtgaatatttaaaatttcctaattgagtcataaattttatttgtttttttgcagtttattcaaatcaggatccaaaaaagtccatattttgcaattggttgatctgtcttaaatatttttgaatatgtagattgtccccctgtcagtttttccttgtaatttatgtattgaagaaattggttcctgtcctctacaccagtgcttcttaagatgccagtccacaaactcctgttactggtccatgatgagatgagaagccagggtgtaaatccaaaatatgtcactaagcacactatttagttcagctgatattttatttctagggagactttctcgatgaaggaagcagtgagatggtttagattctagcttaaactccttatctcaatatagactagtaacgtctagtttgtagaacagcactggccagtccttggaccacacatggctttcaccactggagagtttcttgcagtccagtgatgactgcattccagtggtatggtcctaccatgtttctcagtcccctgtatttgttgtgaattgctagttagagctagatgcttgattcaactcaattaacttttttttcaagaagactttataagtggtatgtgtccttccattaggagggacatcattactactagtctctctttttgtgttattagcattcattgataatcgttttctagatctattagggtggcagaatggggatattcaaattctgtcatttcctattgacttactaatgctgtaaagttttactcctagttttgaacttaggctcaatgcttcacagccagtaatgtttgcaatatgctgggtctgatttttcttatctgcgactttgttgtagaaaaattatttaatatctaacagtaaggataggctattatgagctatgaaattgtggaaaattcacacagaaggagcctggcatttgaaagggaagaaaataattctgcaaaggtccatttatcccatgatcttttgtgagtgtcaaggtggaagcactcaatgtgtttttattttaaagtaagggatttcaggcaagaaccttatgaaaagttggtaagattttggactatgagggtaataaagaagatatctgcagagattttaatattcagaagtgaatttttgtaccttcatttcggcattgctctctcaggaatgctcttttttttttttttcttcaagaaattggaacaagtacaaccttagtgattcaaatgaaagattctgaaaattactggtacacccagtcccctttggggaaaggaaggtagggacaagagctgccccaggagcacctccccgactgtttgtaggggatgatacgtgcgcatgtgcatgtgtgccaggcacatcacccgtgtgtttcatgtcagtgaaacatgtccgtcattctctaaggcctcatgtattcttacttgatagaaaactcctgggtgaaatgacaggcttttggaactgctttttcgtcagtgggtgctgctacagagatttggaagccctttaggtatgcgaggtggatgtatttctgtctgttttgacatcatcatcaccacttcagaagttgtcatgttgaaactttgtgctggcatttagcacctgctctgcttaattatagcttgaaacacaaatactgtgacatcttccctggagctggaagggtgctgagaggacagtgctggcatcactcacactgagagggaaatctttcgggttggatttcagggaagagctgtgctggccattggaatgaggacagtcaccactttctctgtgtaatggacaatatcccagcagcctctgaattaagtcacagagacgtgaaattggagggttttttttagaagatcatctggatcacccaggccttcgagcagctcattgtcttcctaagccgggtcagacagttgcctgcgtgtcctgatggttttgctttgagctacttttcaaaagacaagccacacccatgttgaagtgtgtgtactaacacattccaatgccagctctgagtaggttttgaattatccacatgttgaatctttcttgtgctctctacacatccactccctcaaacgttgagcatgttaagagctgactaatgtttttaccggagggtgcaggacagaatactcattctctgttgggaaatgcagaaactatttcagaaacagaagtgccaatctataggagtgaatgttcctaaaatgtgttctctttacattgttttcctttgctaatacacttccaaaacactgtcttatttatttattttgcaaacctagtaaaaaaatcagagcacaaaaaatgatgtacaaattagtttatacaaaaaagagaatacattctctttggagtatttatggaaacatctttctaatctctaatctaaaaatctttaacactaaccttggaatgttattaataaagtcttttggtttttaattagggatttatgacgtttccattgtgtagcctttgaaaaattacttcacttctcacattttcagtttcctcatctgagaatgagcacaccaatacattttcttgatagggtttgggggaagagtaaattttataaattaaagctctctaatagttgctaattattatttttattccactgaatgacttcatgtggactaaagtactgatttggttaaattcccttaaatttaaattagactatttttattaaaagttttccacatatctaaatgtttaaaaaataaatgcttacaactttgtttcaatttcaaaattaaaaaaaaaacttaagtttttgactgctaatattgtgaagtgttaatttcaatgaaataatctcagcaaactgcatgcttttacctaacttcctctgactttatagaaacttaaaatctgttagtgatttatttatttatttttgttcctgagcaacaatattgtccctgttttgatgggagggctagatagagaaatgttttaaagatccatggcctgttgactgctatgaaatatggtttgagctacaagatctctgaagcttttgtagctataaatgtttctaaatgatgcaactgaaacatggaagaatttcactctcgtactccatgtattccacttatgggtaattgttgttatgtgttagattttttccttttaattttctaaaatttaaaaaagtagatgaaatgatactgatttcttactagtaattatacttttcattttttttttttttttgagacagggtcttgctctgtcacccaggctggagtgcagtggcgtgattgcggctcactctagcctcaacctcctgggctcaagtgatcctcccactcagccttccaagtagctgggaagctacaggtgcatgccaccatcttggctaatttaaaaatttttttgaagatatagattctcgctatgttgcccaggctggatctttttttaaaagtttcttataaacatatccacctttttaaataaattaaatactcactactctgatagacttctcattaacttatgttgtcttagtggtaaatgaaactctaaactctcatttaccacttaagattcaagtattgtgttaggtgctgggattgtaaagataaatctgaacttgctatatttaaggaacttgcatacacacacaaaaaaaacgctggtaatttccagttttaggagaggtgaaattcttgaataattttggtatgagactaaagtcaccaaataggattcaaaacggacttgcttccttgcttcacgtgtaagccactcgtgctagaaatagctcactgaagtctatctgtgagccagtccaggatactgattttatgttatagttgctaatggggcgggatcttctggcctttaaaataaatcaggtgcatcgaggatgagaactctccaggttttaagtctctgattcatggacctgtggatgtcctgtattggccctgatggtctcatgcagggggtccagaagggtgtcaagcctgggctgggacggctctgactctggctgccctctcaggactgtgtggagttgcctgagtttaaggtgttcatttctcacagatcactgggcagcttactaagctgagacatggtgggtttgagtggccaagttttcctctggttgcctgccgtggaatgtgttttcccatagaaacaacattttaagttgtggtcaggttcccagaccagcccacaatagcctattcagctgataatgcagctgagagactgctatttgactggtctggagaccaaaccaccacctattaacattgtttctattggacaggccattccaagttctaaatactaatatagaaatgaaattttggagctctacctgtttgtcaattgggggctgacagcattcggaactcaagtatcaaatcaccctgcactctaggttcctgaaagacctcattctttctttctcctaagtctgaccccattggctgattttcctgtctcttcctggggctgccagtacattcagaagatattatctccctggacagagctcttggtttgagaatttctgggaagtggcaagaatcatggttttagtccccagttccttctgtgggtggtaaaggaattccacaagctccacccccggctccgcctctggccggcctctctctgtgcaggctcagaatcccctcaccacttgttttgtgttttcaatcatttctatgatttcgttcaccctttggaaaagtacagtgtggcttcaacttgaataaatggaatgaatatcccagtcaaagaaaagctcttgatagaccctgagctcactggtgaagtccaggggtttcagagtgctgggaagcagttctttacacaggcaacatgttctcatcgtgtcattggccatatcctctcagatgctccagaagcaaacatttgagataagctggattttctgtttggaagcaatgcttcctcatccttagatggtcaaatagttgaaacttcatgaagaaattcacctcttcccatgtatgggagcaacttttacccaaccaaccagacatgtgacgccagtaggccagatacagatgccctcccttggagaagtgatccagtacacactaggacagcaagttattcaaatcattgccttcagaactttgaggagtccattctggtggtgtaattttctaagcagacaagcagacttagtgttcttagtgctgcttaatccagagttccagaagcatgaagtgaagagtgctgacttgctgcacacatgatgtactttaaacatctgtgcctctggtcttcatggttcaattgtctagtttcctgtagagtgcatcccatggctttttgagcttcaaattctttttttttaaatatatacactccacctataaaagattccaataggatttaaattggctgtcagtctaaaaatgatgtcccagatccgaggaactgccttttcagctttctatttcctaattttcttaggctgtgcgtgtgtgtgtgtgtgtgtgtgtgtgtgtttgtgtctttgtgtgtgtgtatgtgagagagagaatgtgtgtgttggggaggagggtgcatgtgtacatgcccttgaagggggacgacatttttggaccataagttcttgggctattgcttttgatcaacacaaaatctccatgaaaagttgagggtacacagtgaatgaaactgttgatgcaacacctttgtgctgcttgtgctgtgagttactccactcagcagtgggaaaagccttcatccaagcagcacatccaaagagacctatcaaggtcactctatgaattttgtcatgattgtctgtaggaattggccgcatgaggctggctccatctatggccttgatcagttgcagcaatctgccataataaaatgcatgccaacttgtgagctgaaaaccttcacttagttgcttgtgggattttttttcttcttttgccaaagaaataaatagaatcaaatgtttacatatgtgtgttatttgtctacattgattttgtattttctcaaaggaaaatattgatttctgagttataaacatgggtaacttcactgatcagaataagttaatgacaggcatgtcagtgaaataatcaaggcacaaaaccaccatacatttctgtttaactgcctatgtagcctttcaaagacgtgttaaatagtcttcttttaaatagataaatttataagaaataattctatcgcacagattttaatgtcggtggcatattccatctggcttacttttggcactgaggagatgatattaatctttgctaattgtacttcgtactcactattgcctttagtcaatattatcttgtgtgcttctaaatagactccaggatagtctaggcataatagacattgtttctgtgcctgaagaacaatttattactctgggagtaaagggggtggtgggttgggcttcagggatgagatctagacatataattgttttaaatatataactacagtatagcctatgtaggtttttgaagatatgtctggaattgtgtttgtagtgtgaaagatggatggattcatcagggaacactaagggagatggaactacatattgaaatggaaagatggaagagctgatataaaaatggaggaagtgtctggttttagtgtgtgtcagagatagcagtgcgtgcatgagtgagggctgagacggtgaagaagaggagctgagtaggagggtggaagttgaaggtataggtaaagataagagttgacaggtagattaggcctacctggtagatatctgaacctaataatgagatgtttaacattatagagagtgaaggtccatctttgggctgtaggggaatagaaataagcacggtgaatatgaaaagatacttacccatattgtcctaatggagtagagagaaactaggaagccaggaaaaaagaacatgatattggtccaacaatgaaatcaccaggatttggacaagggatttgctaatggagttggagaatttaaggggaatttcatcagtgggatgaaataaaactagtgactccccttagcaaccgggaaacatcaagtcatagctcagatagtcctcttctgagcttaccatgcatgctgtggctaaaggcctttgttctggcctccctgagttccccaggcagaccttgatgttagtgctttgtctgttgtgtagataatctttgtgtatgtgcctgtgttcctagactgtaagatcctcaagagcaaagactgtgtgtcttagtcactttttaaatatagctgttttatttataattgcattgggacaggattattattattttaccttaaaataaacttttcactttagaacggttttagagtcacagaaaaattgagagagttgccatatactctggacactttactctgttgttagcatctcatactagcgtggtatattttttgtaattaatgaaccaatttttttcttttttttttttttgagacagagtctcgctctgtcacccaggctgaagtgcagtggcacaatctcggctcactgcaagctccgcctcccaggttcacaccattctcctgcctcagcctcccgagtagctgggactacaggcgcccgccaccacgcccggctaattttttttttttttttgtatttttagtagagacggggtttcactgtgttaggcaggatggtctcgatctcctgaccttgtgatccgcctgcctcagcctccgaaagtactgggattacaggcgtgagccatcgtgcccaaccaatgaaccaatattgatatgtagttagtgattaaagtctattccttattcaaatgttctgagtttttacttaatgtcctttttatgttcagaatcccatctaggataccacactgcatttagtagtcatgttttcttagacttgacttagctgtcacagttctcagactttccttgttttaatgaccttgacagtttttagaagggctggtcagatattttgtagaatggcccttagtggaattatttgatgtttttgtcatgattacattgaaattatgggtttttgggaaaaagaccacagaggtaaagttccatttttatcacataatattaagggtttatagtatcaacatgattttccattgttgctgtaacccttcattgcctggctgagataggatttgtcaggattttccacttcctccccctccctttatactgtactctttggaagacagtcagtatgtgtagctcacatgtaaggagtggggagttatgcttcatctttttgaaggcagagcatctacaaaattatttgaaagtcggaagcacaagagatttgtcttttctctcccatttatttcttcaatcatttatttatcagtatggacttatggatatttattttttacttggtattgtaatccaatgctgcttttgttattttgttgctccaaaagggttctagctttggccatttacacttccttcatttggcttctgtgtcccttgccatgctcccctcagtgtggatgtttgtttagcacttccttatactttctgtcactgcaagatgctacagattcagcttgtctatttcctgcccagccctagaatcatctcccaggagccctgattccttttattgaataatagtattagcaaccaagatctaggcattaggtgtgctcttcttggtcagttttatttcttatctaacacagtgcctagcacataataggctctcattaaatattgctgaacagccagcagtaatggaatgttgagtaactgatggtacaaatgactcaataaaatattatgtatctatcaaaaatgatcattagatttatacaataacataagtgaaaaagtaacaaaaaatgaagattgtaataacactcatgcaaaacaagcagagactcgtgcaaaaaatgctaacatggggagctagatttgaattttggctccccagtttattaacatatgaatttagatggattaatctctatggcccagcttcctcacattaattataatgcaacagtaatgataaaagtaataacttatttcatagaagtattgtggggaggtaaatgagtgctgtgactgaaataggataagcactcaatagatatgattaatatagtgattattgtgaggctgatggaactatggtgttttgtctttgtttcccaaaccctcaatgatgtgtaacattacatacatcgtcatctcttcatctctcttcccagtcttctgtaaggaatatctggagctggatcattccagccatgatagtctcactctcccttcctaagaattcccatagtgcttcctatttgaaatgattgctcagcaatgtttttatgttgtctggggttcatcactaccctttgtacatacatgctcctccagtcccccgaccatggctctcaggaaaggggcagcttgagtccctctcatgagcccttcagcgcacaaccaaatgtatctcaataggttaatttaatttttaaaacatgttgatttggcattcatataggtcgaagcatgtagagtatccagacttcaataaatgttagttcttctcctgtttttttttttttaacttttattttaggttcaggggtacatgtgcaggtttgttatacaggtaaactcgtgtcatgattgtttgaggtacaaattatttcagtttgtttcttaatcatattttatttccatagtcacaaaaaaacaagaaacttaaaaaaaacctttgggttggtaaaaaaaaaaaattgttgaacagctttgtgcttgtgggcaaggtgaatagtcctgatgtatccggttgtggacctggcagtgaacttactggctacacaggaagaggagctattgatcttggataaattgagtttgagatggtaacaaaacatttaattctaaatgccctgaaaacaggaactgaagagagaagaaaagagacagagtggaagaaaggcagataggaaaggggagatgaggaagggagggagagaaggagggagagagaaacagatggaccatggcttgggaggaaaacgtaatagagtcaccaatctactggtgatggagaaggcaagaaggggataaagctcttgaaaaccagaataaatctattattcattctgttccttttcagattactttcatctaaaaaataaaaaaaaatcccaaactgcacaaagtaagttagagtggttggctggcttgcatcctcaaaggaggaagccagaattgcccgtgtcccaagcagtgtcaactcagacaatccagaaaagagtctttgggtctacagcagtggtctccaaccttttcggtatcagggactggtttcgtggaacataacttttccacggaccaagggtgctgggggatggggggatggtttcaggatgattcaagctcattacatttattgtgcactttatttctattattattacattgtaatatattatgagataattatacaactcaccgtaatgtagaatcagtgggagccttgagcttgttttcctgcgactagaggatcccatctggtggtgataggagacagtgacagatcatcagtcattagattctcataaggagtgggcaacctagatccctcccacacgcagttcacaatcaggtttgtgcttctatgagaatctaatgctgtccctgatctgacaggaggtggagttcaggtggtaatgagagtgatgggagcagctgtaaatacagaggaagcttcacttgcttgcctgccacttaccccctgctgtgtggcccagttcctaacaggacatggaccgttactggtctgtggcccaggggttggggaccccagtctagagagtcaagctgaagcttagggaggtcatggaagctgttctcattaccagggtttgaagttttgttacccaggttgcattgtgactggcagatggactgtaacagtcacatgaggtattcacatcactactgggagacttgacctctgacttcagtgaagagggccagaataaaggcactaaaataaagagggggaatatttgaaaggttcgttagaatagtatgggccccttcatcagacagtactcatgatgttttttctttttttatcttgataagaaaattgtcaaagagcaaataaaatcatgatgtgtagttcacaatacaggcagctcatttatgtattgtaattgtttcatgatctatcacattttttatagtggaagttattttaaccttggaacagtaggatgttaagatattaacatgggacacattacatgggaagttgggtgtcctttgttgtgtgagggcatgtaccttttgatcccctccagatttatacttaaggggctaaatcatagtttttttccttaaaggttaaaaaaaaaagcagttaatggagcagggtcagtctcattagcccttacctagtacttgttctccttgcccaagagtttaatcactaacaaatatgttgagaaactaacatatatgaaataagagcctcctgaccttgtttttattaccttaaccttttctgaaaaggagtttgcactttgcataggaaacagaaaggctatcttgctgtaagaggccaaattgcagaagtgggctttggctaaggaatgtggacacactgcagacatcttgcacagaggccaagtcttgcaatgatgtggtcagacgtggtagaggccagctgtttgctccgttgagagaggcttttgccagtccacaggctctctgagggctatgtttaactgaatccaagtatcaaacctgctgagactcactcatcccccagggtgtttggagttgggttcttacagagcacaatattgaaagtaactggtaagagaagttacagataaagacttagctattttaaaaaaatgtaacatacagtggtgaagtggaatataaatgtattttccctctttcccctataaactattggaatacaggtaaaaacagtttatgctggctgggcacggtggctcacacctttaatcccagcactttgggaggcagaggcgggcggatcacgaggtcaggagttcgagaccagcctggccaatatggtgaaaccccgtctctactaaaaatacaaaaattagctgggtgtagtggtgtgtgcctgtagccccagctactcaggaggctgaggcagaaaaatctatcgaacccgggaggcggaggttgaggtgagccgagatcgcactgttgcactccagcctgggcgacagagcgagactccatctcaaaaaaaacaaaaaagcaaaaaaaaacccccaaaacagtttatgctgtgctttatccttggtctattgatggacattctgtgatttgtgttacttatgtcaccatgaatactactggatgaaatatcatcttgtcctctaagtacacttttgacttaacataaggttaggagagcgtactctagaatcaggaggcttcttgagttcaaatctccattagacacgtctaagctatgtgaccttggccaggttgtttgaccttcttaagccatagttttttttttagtgttaaacattataacaataaaaattacctcaaagagttgttattaggatgaaataaaataatatatctttagcacttagcaaaaagttatttcccctttgaattttaattttttaaaatttgttgaatgttattgctacttgcacagagctttaaatccgactttgtgtgtgtgtgttggagtgatgggggttgatggggatggctcatgaagtgaaaagagaaagaggtatggatgctatactttcattgacccgaaagagtaactttattaaagatttaccttccttgtacaagcattttgtattgaaaccttataactaaatcttttattatggaaataatccagcatgtctcatttagagtttacatattttggttctttccagcttcaataagacattcatttatttccagaattagagctgttttttttctgtgtataagtaaaacaaatgtcatgcagcttgtttgaacgagttctaatagtttgcagtttctcaagaccaaaagcagcagaggagaaatcttacatgtttcaaatactttgcgttgagccataccacatagcatttagaatgatttaagaatgaatggcaacacaattaaaacaatcattgtcatttgaaggtattggttgaaacagctgaaattaaataacatgttacttgttaatgataaagttttaaaactcatagaaagtcagaggatgcaaataaaataagtccaacccaaaattataaagaaccttaagaaatacagtgaaatgaaaatgtgatgcactaatgaaagggaatggtgaatgaataaaacaagaagtattctgtttcaaagataagacgttcatacttcgaaagtctagttattgctttaagtgaaagacgatggaaatagaagagcgtatattttaaaatgaacagttgtggatgaatattagataagaaagcaagagaactctctctctgcttccccgggttctcatctcttaaggtaactaggttgaaacatttctgttttttgttcttctcatgtaacaccatctaccatgtttgtacctctgtatctagatttaaacagtacccactggtttcttgctttgaaagatggggacttagctcactaaagtatctgtaccctctttctctcttcttcttcacaactttaaaatatagttttagtataacttttatgtattggttattttaaaacacagtgtaatatatataagactctgtttctaggatcagctgctttattgactgccacacctttcctcccaaattgtttcccgagttatgtcatctgtcccattacttttactcttgtgaaggtttacaacatttacattttcttttgtaactatagtaaattgtaaaatcttccatgttttggctgtagattgattctaaacattaaaaaaagaatgtttatattaccatgctttttcaaattccttggaaaatctttagaatattttgctttgtaggactgaaattgttattctggatcctttgtttctgagcttcttcatcttgtgtatgtgttatgacatacatatttttgtcagacactatgactgtgacatattatgtcagacaatgtatgattgtagtaaaaaaaaaaaataaaaccttgttatgtcaaccacagggcaccctgcaaaggctcaggagtgctctgacactattccaggatttggtagggattggactatctccagcggagctgttctaatgggctgttgctggagaaggtttgaggtggttgactttggcctggattgtcatttcaaattgagagaacttttataataaaagtttggaaggtttgtgcgttcccctctaccccagctgtctaccctcacttcctctctcattttcctttccgagaatttgaatttccccaggaacttctggacactctgaagtttcaggcattactttgtcatggagggacaaagggttgagagcctttgacttaaaattctccataacatctttcttcctttattccttgtgtttccactggctgagtaacctgggtcagaagatgattccatcaggatgataatgctgcattgcattttcatcatctttttcatatatgaagctttcatgtccattatttgacatatatacacacaagggagacatttcattgtgccattgtacacagaaatatactgagctcacacaggctctaacatcatgcacatatttcacctctatccaatcatttcctctctatccttagagaaggcctgggctgctgggtatggagttagggccctttccttggctcctccagctttcttcctaaatccctttctgacctcagcatctgtcagtgtgaagcatgtgtggtgccctgcagggtgttccagattttctggagcaacaaaaggggtaaaggacatagcaaagaccttatgttggttcccaaacctgcatgatgttgaagtagtgagttcagaggaaatgtgggaggactctgtactgtttcacgtggtctacatatacaaagagaatgtgggagtgcaccctaactgaaaatacattttagctatacagttgtttttaaaggtttatgcttttgggtttacagtgtttataccagtaagctttggaattgctcctagtttgtgaaattgattgcaaaacatttgaccttccttattagcccctgatcgctagcagctagcatcaatgcttaggccctcaggatacggcaaagtaaaactaatggttgcttctaggtctctgtgtattatagtctctgtcctagtttccagtgtagaagtcattggatccttacttagttgctccctgaaattgttaaatgtggatcatctggattctgaatggagtttctactccaagacatgtgatgaactgtctgtaaacaagaaacccagagtgacactgattttattttcttgtaactgctgttatcaagtgtgtttccaaactttttgtttttggagacagagtctcactctgtcgcccaggctggagtgcagtggtgcgatgtcagctcactgcagcctctgcctcccagattcaagcgattctcgtgcctcagccccccaagtagctgggactacaggtgcgtgccaccatgccaagctaatttttgtatttttggtagagatggggtttcaccatgttggccaggctggtcttgaattcattacctcaagtgacctgcccacctcggcttcccaaagtgctgggattacaggcgtgagccaccgcgcctggcctgtttccaaacttttgctaaagaaatatttacatgttttggcctttatttttttctgactcatgtcagagtttgcgttcctgtaattttagtgaaagggagaatatgtaaaattatagaggtgagatgggccgtaggaaaatatatatatatatatggcttcaaagtgtagaaatgtgaagtcttatgtgcattagattttattacaaactttcttaaccatattggtaagaaatttattgtttaagtttattgtctaatttaagacttgtatggcttcatgaattgtgacagaatgtgctacattttgtatctctggtttttatttccctgatgggccatatgcataggtgatattaagggatgtccctgttgatatcactatgttagtgtcccaagctaccaacccagcattgagtctcatgagtttgctttatctgtctgccaggattcatcttgcttttataactcaggaattttttttccttttatttggccatctcttcctcttcttcttttttttaaagtatggaattcttctgtttttgttttagacccaatgtctgtggatcacgttataatgcttactgttgccctggatggaaaaccttacctggcggaaatcagtgtattgtccgtaagtaaatagaaaacttgtcattctgcatgtccttcttttgttgtgttggttgcatggggagccttagaatgtggccttttgtaactgtactattaatctgttgatagtacagccttccagctttaagacttttctacctttccagtttgggaaatacatcaacttggtcaaaccctgtcaaagtttagtcacggggatactttgcttgaggttgtgtcatttacatatgttgtgcctggctacacagactatctaattactttgatgggagtttgaatgaaagggtattattgctgcttttcttattgtaatttctaactttgttggccactcacgggccttaccaaaccctgtacattgaatttgggtgattgagggaccaagagcagacctgactcttagacagaggggaaaggaaggagatagatcaccagacgaagatcagtggaaagactaagaaagatctcaaatgataacagaggttcctctattgatttctgctggcaaggcaaacttccagatttccccaatatcccacaaatgttgagtgacaaatcgcatgccagacaaggtgttctttaatggagacaccaaagtcaaatttagtcatgatgcctgcccttcatgagcttttacagttgttgtacctatgaaataatgtccagttttcagaaaactccagtagtataatggggaaatttagagctgaagggacattaagaatcacttagttcaccttctcacttggctgacagtggtcaatggagtattcaatagactatattggccaatatttgcttcatgacctgaaaaagtttaactgtttctcaattcttgattttgaccagaaagcatctcctttatttggcacattatggtctaagaccaaaattggatcactaaaagagaaatataatggtatttggatttttctcaatgaactttataatagaaccctttcttagccttctgtagagttctctgagaaatgatgtctccagatatttaaataaatgtttactggatctttgacagtttgtttcttagtcgtttccagtttccatcctaaactctttggatgtttgaatgcactttctatcaagtgtactcttttagccttgcatatcatgtttgcacttgcaagattgtgcaggagcttgaggaaaagatcatgcctgtcatgacgaaaagtagtgaccaagtgctagtctgccgataaatataaatcatatgccatttaaacttactgttgtgaccactagcagagcatttggtaccagcatgatattagtctctgggtggtatgcaaatgttagtatttctctaaaggatgaatggcttcctgactgtagaatcagtactctagcagtagattccagcattcttctctcagactgttgatggaattcagaacaggataaaaattaaacattaaacatttacaataggctggacgcggtggtttacgcctgtaatcccagcactttgagaggccgaggcaggcggatcacaaggtcaggagattgagactgtcctggctaacacagtgaaaccctgtctctactaaaaatacaaaaaattagctgggcatggtggcacatgcctgtagtcccagctactcgggaggctgaggcaggagaatggcatgaacctgggagacggagcttgcagtgagcagagattgcgccactgcactccagcctgggtgacagagcgagactccatctcaaaaaacaaagcaaaacaaaataaatttacaataaaattggctcccaagagtaataatgtaatttttatatcattaaatcttagagttaatataataatatatttcttgtgatcatataaatatgtttagatgcaggatttaatttgtttgtttggttttctcttcatagcctgtcctgggcttctgatggattgagtgctgtggactaagcaaagagaggttgagaaccaccgtgactggataaaggagttgtggattttaaagccagagtttatttagttcaatagacttgttttgaaaatgagtacacctgaggcttaaggtcatataagtcatgatagcaaagtttgtgagggacctgagaacccaggtttcctcatttgaggattggtcccctataacaaatcgtgttccaaatccatgtgctaacagacctctggtttattcacagccatttgccggcattcctgtggggatggattttgttcgaggccaaatatgtgcacttgcccatctggtcagatagctccttcctgtggctccagatccagtaagtctaacatgtcattatatataatattattttatgtggttataccccattttctcctaaatttgattttggctttcctctttcctgcaatacattttttcactagaacatctgccttctctgttctgcccaaaatacttggaaaggctttccttcatctggcctctcatttcccttctttactctttataggaaaattacctatggggcatagttactatgaatagtataaagcttatggccttttatgtaggtatcgccttattcatctttgtatctccagtgtaaacaccataaaaggtgctcaatgaaatggttgtttaatggacatttttggctcaagaaatctaggcatgcttccttgtggtactgaaatatgaatctgattaaaaacttatttaagactcaagacccctgctttacaagaagaaaatgtaagaagtcattatggaagtttctgggggtgatttataatgaagcataaacatatttttcctttcagaatgttgccactttctgtgatgccagatgaatatccacagttcattcttcagaaccttttcttgcttgttctgttgtttttcttttgggggtttgggcaagtgagtcataattggttgtttaaaaagctgaagttcttgtttgtataaacagcccctcaaaactttgaccgtccccatggcaaaaaacgtaggtcccttttccgtttctttttgtcctgtaagaaaatgcaccccccttattgtgtgtcctattttgacaaagttttaaagaaaaacattgtggaataagtgcattctcttttgtttactgcaagtagagacttcactgtgtcaaggctcattacctgttaagagtctgaacatttgagtgtgtctctcacaagccaattaacaggttagggcaaattgtcctgtgtagcactcctggtgccctcttgcctcccttggcttcatggatgaacacgggggactcttcctgagagctttgtatacttttctggccagagagcatgccaggtctgcatgcagggcaagctggaagtgctgggggttagtggacctggaagcagacttttaaccaacaacagatggagagtggttggataagtgcctcagcttccttgcctctcagtttggataaccatgaggttcactctgcactgtctcctgaagttccccagtgggaccgagccctcgctgttcacagtgataatagatttgataatgtactttattagcttccttctctttttgtctcactttcccactctcctatgagtgtttcctagaattactttcagaacaaactacttccatttaaattattgtctcagaatctgcttctggtggagcccacacagtaacagccaccttttactaaatacagccagttacaattgggatagaaattgccctatgggctgggactcttgcttattgcactgaatgtgtagcatagttttccttgatctcagcttggtgtcagacatgcatcttccgagtaatagcaggttcattctacgtagcaagagcccctgaactggaggaatagaacgaggcagagaagccagctggcagcacatctgggaacatgcgggacatctccgtctctataagggtgacttccaggctgccgctgaagcataagcatctcagggttggaaaagaagtgcagttataaagttgggaatagaccccatctctcagattggtccctgaaccaactaacaacattgcactcctctgggggaagaaatatagccagatggcaaaactgggtattaagttgggaaggtcttcaatgataatgtgaactgataatgacttctctatcgagtagaaatcatgagatgtggagacaggatgttaacaagaccagagggaaaagccatggtcctggtagaatccaagttaactgtggggtgtgacgagtatagtagtaaggtcctggggccagatttagtctagagactaaaatccaagactgtgggtggtgctttctgaggaagtctgagtcatatctatggtacctggacgttagacaaagtccccaagtagcttgtggatgagagtagtgtaaggaggaggttctggtttcatcaggatctttggggttacttgaaatctttaaaattgttggctttgattctctctgcactaatattgtctaaatggcttgcaaaattaaagatggcaaaatattttaaattaaggatagctggggatgatcagaattcatttctcatcttttggagtgatgttctagggaacagctgtgccattccacagaacatcctgatcactttgctaactttcctgctaatagaaggacaattctactcagtgaaatgtttgcattcactacatgtggttctactaaaaaggatcaatttagatcactgaacgaatttttcctctgaaaaattttatactttttatatgatagggatcaaggaggtctaggcaagtcgtgggacctcagagaggcttagttttcccacttgaatatgaacagaatggaagaagtgttgttctttcaggtggtttttgacttgagtgtcctgtgactctgagaatagaaaatgatctcttagtgacctgaatgagagattgcatttccagaaggttcaaagtaccagccagtgattctcttggacaacaggaagttgtggcttcccttggtgctggtggaactctcgacactcgtcattcagcaccagggcaaaaagaatgattggctagacagcgtcaaaacagtagtttttctagactttaattccagccctctttaggactgttctttgctatgtcagtctctgagggtacagatggattttgagcaatcctaattgtcataaagacctatcatggtttactgatgtatgaatttactcattgttctaatatgtgtatacacacattcaaatatatattagcttgtaacactgggattaataaactctataactttacatatatatttgtcagtttgggcttctataacaaaatactgtagactgggtcatttataaacaataaaaatgtatttttttacagttctagaggctgggaagtccaagatcaagaggccagcagattacatgtctggtgaaggccttctcctcctagatggtgctttctgtgtgtcctcacatggcagaagggacaaacaggtctcccaggccttttttttttataaggatactaatcctttcatgagggctctgcctgcataacttaatcacctccccaaaggccccactgctccatactctcccattagggactaagtttcaacatatgaattttgtggggacacaaacatttagacaataatatatatatatatatatatgtatatgtatgtgtatatatataattgtctaattatatatataattatatatgatacatgataaaagttgtttcctatagtttatattttgtaattttgtattttctattttgtaattcctacagtttatattttgtaattttgaaatcttctcattctgttttactctttacactttaagaatgctaaaaattaaacttcatattctgagataattgtagatttacaaacagttgccttagtctgttttctgctgctataacagtataccacagactggataacttataaacaacaaaagtttatttggctcgtggttctggaggctgggaagtccagagcatggcaccaatgtctatagagggccatcccatggtggaaggcatcacatggggagcaagtatgagagacagacagaaaatggggctgaactcccgagatgaccaacccactcctgagataatggcataaatccatttatgagggcaaagccctcatgaccttatcacgtcttaaaggttccacctcttaataccatcacaatgataattaaatttcaacatgagttttggaaggaacattccaaccatggcagttgtaagaaatcagaaatatcctgggtattctttatttagttttccccattgtgacatcttgcaagactatagtacaagagcagaaccaggatatcacaaaatcaatacagttaagatgcagaacatttccatcaccacaaagagcgctgatgttacccttttattgtcattttcttcccgacataattctctctttaattctgacaaccactaatctgttctacatttctataattttttcatttcacaaatgttatataaatggaatcacagaatatgtaaccttttggaagtggcttttttcactcatcagaattctctggagagtcatctaggttgttgcagtatgaacagcttgttatcttttattgctgagtagtagtacatgctatggatgtaccacaagtttgtttggccattcacctattgaagggcatctgagttgtcatcagtttttttttctttattatttgaactaagctgctatgaacatttgtgtacaagtttgtggtgtgaacacaaatcttatgttctctgggataaatacacagaaatgcaatttctaagttgtatgatagtttcatgtttagcattttaagaactgtcaaactgtttttggagtcgccgtatgtaccattttgcattctcaccagcagtgtatgaatgacccagtttctctgcatccttaccagcttttggtgttgtctttattttttattttagctattctgattgctgtgtagtcatctcttactgtggtttcaatttgcatttccctattggatagtgatgtcaaacatctttttatgtgcttattgccacctgtatatctttttcagtgaaaggtctctttatatcttttgtccagattcttatttttcattaaaataatttttttagacggggtcttactctgtcacccaggttggagtacagtggtgcgatctcagctcactgcaacctccgtctcccaggctcaagttatcctcccacctcagcctcttgagtagctgggactacaggggcacaccaccatgccccactaagttttttgtatttttggtagagacagggttttgccatgctgcccaggctggtcttgaactcctgagctcaagcaatctgcatgccttgggctcccaaagtgttgggattacaggcatgagccactgtgcctggcctcttttgcccagatgctaattgaattgtttgttatttcattgttgagttttgagaattctttgtatactctaaatactagctgtttatcagatatgttatttgcaggcattttatcacactctgtagcttgctttttaatatttttaatgggatctttcatagagcaaatgttttcaaatttgagtaagtctaacttatcagttttccctttactggatcatgctttcattgtcaagtctaggaatgctttgtctactcctagattctgaagattttctccaacttttttctgatggtttcatagttttatttttatttacttattctttgagacagggtcttgctctgccacccagatgggtaggcagatcttccccactttatcctttttttgttttagctattctagttcttttctgtaaaaactgtagattaatcttgtctatatttacaaaaccttttaggattttgataggaattgcatcaaacctgtatatcaatttggggccctttacacttttcaaaccccttatagtttgatcacattttctcatttaatttacttcaattcaatgagagtgtcagcaggaccagtcgcagacaaaacctctcggacaccggttttaggaaggggctttaatcagctgggagcaagagtttggggcatttgtactcccaatgcaaatctgagctctaagggtgtaagaaggccagcagaacaattctagaccagtgtgttagcaagtttgagggagtatggtgcaaccatcctgaaagtgtggggacattcagaggaagggaaggtggtgctttagccagtctggaagaagtcctccttgaaaaagcttttcagggaagtgtgggatttatatggactgggaggagaagcatgcatggaatctactcagacttgtccttagaaatggttgaactctttgctttctactccaccctttatggaagcacctttatcactactgtcatttaacttgtccttctctacagcttttccagcttggctagattttgtttgtttatttgtttgtttgagaattttagtgaagtttctcttccaagctgtgtgtctttaggcatccccagacatctgttcacttaagggaaatgccattgctgttatccctctaaatgaaaattgtttttatcctgcagtgactctgattgtccctgtggactcttgtctcaggtgtagagtccagaagttagtctagctgtttaatttgtctgtctgtgcttttcctagtacctaaattaaaatcacatgttcgtcatacaaatgcttatgtgcaaattgctcccagtgttcttcctgccagttgtgcctgccaagatgatggcaggtctttagaatcattccaaacctaatgcatcccaaagaaaatcattacctgaggtattgagatccaggtgccagccctgcctctctctcattcccatagcgtgctcacattgttcttttctgatgaatcatttaagaactaatctgtgctgggctgtaatctaaagaaaatttcttctgctctttctggccaatgctgccaaatgaaagacgttcagtaagtcactgttgaatgactgaaatgactgactgacatctgatatgaacacaaaattaatttgggatcttttatggatatggggagatggcaacattttctgttagctctgggttattgagccttacatgaaaccctttacggctgtctgctcgtcttcaagggcaggtcctcactgggaccctaggacactcagggttcactgcatatggctggatctgtgcactttgattcccctagtgttttcaatttctagtaaaatcttaacacagattgagtttaggaatatcttctgacttggggtacttagtgcatccagtaaagaatacagcatcattatgggtgtaggaggaacccctaggtttcagttggcttttttaagagacgtagaacttggtctcctaattatgatacatctagaattcttgttcaaatcagtataaatttagaatatgcatcaatggcaggactgaatccaaaataaaaccaatttcggtatatattctctgtaaactatttcctgcgtgtacagtgaaactacgtatctagttctttcacttccccacagaaatcctgagcgactgctcccacctttatcggaatgctttattccccactaaagatctaagactcacaacgaatacagtttcccatggttaacacggtggcaaagcaagtgattcagagcctattacctgtgctgagcctgcctcctcctggcttcccccaaggattcatgcatatggttccttgatgtcttcttgtttcacaagtctgaatgagtgcttttattttttaaagaaagaatattttatgctggaaaaggtttgcctgaaagacagggtaaaaaatatatatcagggagattttttattatattgcatttaattgtaaacttaccattcttgccagaaagaagaattcattctgattttcaacttgaacaaataatgtaaagtcactaaactactgttagcttttttatctcaaagtagttaaatggctttgttgctcatgtgggaatggaaattagctcttggcatgaactgctttaattgaaatcagtttgaaggctgagttcctatgctgcttgacagatgacatcatttcctgtgcttttcccaatcctcactgtttttctaagataggatgaagctaagtttaacttcaaatttaaagcaactatacaccttttcatgacctacttagaatattattcaaagttttcactaaatcattttttttctttgtatacgtatagacagatttttagttaaaaaagcatcttggctgagatgttttaacggaatcataagagcctaaaataactgcaatcagtttccggggttgcttgatttcattactccaacaaaggagttatttctgcattcatacatggggaaacaaagataaaaatatttttaatagcaacctacttagtagggctgtataagtgcctcggacacaatggacaacttctaagtctcagtttggtctttgggcatggcttttgatgtcatcatcaggcagcatgagttaagtaaataaaaattaatttagcacagttttatacagcacttacatataaagcaaggtgctactctaggcacttaagaggtattgcataattaatgctctcccactccccactctgaagaagtttttaaacaaatgagatggggcaaaataagtaaaaataggctggattatataatatatgcttcaaaagagaaatatgaagtaattggaaaggagagagggctcacatttggtttgggagatatcagaaaagattagcggaaggaagcaatatttgaaatgggttttggagatagataggatttcaggtttgggggagaactgtgtgtgtgttgtgttggggtttaggagttaggggcaaggagacaaagaggcaggtaagagagagggttctacagagggactaggacaaggaaagtgccgggtgttttgcatggcacatagtaggcactcagaaatgttcattgagtgaatgaatgactgataagtagatcaggggatggagtcataggacatagtgggcatgtgccaaggagcctcgaaagatacctggggccatgctgaggggaccgtgaatgtggagagatggaggtggctctagttcagtagaaacaggcctttgatggtgtttcagtgtgtggcatgttgttgaaaaggcatttaactttcaactcaacctaacttctttgtgctgtaaaaggaagggtatagaagatagtgggttctgcactttccttccctgttggcaggctgagatttgtgtagctccttataaaaattgtccctttctcctgaagtcaagtagccacttttcaataccgtggctgaggattcctaacaaggggtaatggacagggtggctgttgggaggaatcttctatttgctctgaagagaagatttggcccctgtgcttcaggaagagtgagcataaacagcagatttctgcttttgtgtagaaagaagatattctcttctccttagctaaaattatcgaaccttcttctctgagaatttacttccacaacttggaggaccagacagaataagccaaacctccaaagcccaatcctggcctccatgtgtaggcaggtatcaacaaggattagtggttaattcaatcaagctttggactaggaaatagcctaggattttgaaagtgctattagcattcctaaattactgacctagagatagcctgaacactggagaaatgagagcacttgcctgcgctgttgtcattgctcactatgagcccgtggctgtcttttactccagcttctctgagtgtctcattgtctggggtctaaggctgtcagcccatggtctttctaccctgggccccgaaatgaacacttctgtaggtgaaaatgaggatcttatttagtttgaggttacagtttaaacaagcagctctttctcaggcaaatccagctgtccctgtcgtcaggcagtgttgttattaaatgtctttgtaggtattttcttttttctctattctgcctctaaaatttcttttaacaaaattctttggaatttgctactcttaactgttcccctgtgccatctacctgggattctaaatcttttcacgggaaaattattgccatcataatcttgtctcatatggttactcaaggcaatactttcttgttggtataaattacagaaatgacattgagttgtaatttctgttaaattaaagaagtcatttagcactattaaagtgaatgccagagaaacaattgcattgcatggtaaatgatttttttttctttctttcgctcgctctgtcactcaggctggagtacagtggtgcgatctccgctcactacaacctctgcccccccaggttcaagcgattctcttgcctcagcctccggagtggctgggattacaggcatgcgccattacgcctggctaatttttgtatttttagtagggacggggttccaccatgttggccaggctggtctcaaactcctgacctcaggtgatccgcctaccttggcctcccaaagtgttgggattacaggcatgagccactgcgcctagccggtaaatgattttacacacacaaataatatgtttagcattctcaattaggtcattatcaggtaaaaatagatgaatcctgataagctatttgattttctcttcaaataactacaaatcaactcctgtgagctgttgcaatctatgcatttaagttgcaaaagtgaattcttcttcttttttttcaagtacaacactgcaatattcgctgtatgaatggaggtagctgcagtgacgatcactgtctatgccagaaaggatacatagggactcactgtggacaacgtaagtacactgtagttataagtattctagatgttaacctgtttgtagacaagtagaataaagagataagtgctgatggattttcttcgattacctgggacacagcatgtttacaagtgtccagtgacctttacagatgaacaaatcacttactcaaaaaacttaacaccaaatttccaattggaaccttgattggttacaggttgtttgattcattttcctctcatttaccttcaccaccttgcttgcctgatctccttgatttctagtcaccaccaaaggagcagaattcttgttcattccagacacataccttccacccacttgctgaacttcaacacttggattttcaggaagcatctcaaataaagtatttcaaaactcagcctcatcattctctctaaacatgtcctttatcttgattggtggtatctgcatccctctcatttcctaatctagattctgctaccgaagtacttatcacatggtgttcagtttgaaggttcatttgcacacaccatttattgtatctactttctaccagtccctgtgctttgcagaagacgaacattctttttaaaaaccttgttttttttttttgttactttaagatgagcatatataccctacagaaaatttggaaaagtttaaaaatacaaaaagtaaaattattcgtgatttcatcattccagatagtatcttctagacttgtaatgcatatttggtacatgagttcttactgtatatatagtttttgtaccactttttcacttaatactttattcaaagtatgctcattacacattttaaaatacattttaatggttgcctagtactctattacctggatgtttgactgtttatttaatgaatcctcaatggtgggcgttattcagggcgtttctaatttttgcttttgtgtatatatttattaggattaataatgttattataaataaacaaaaatgtagagaatgccctagtgaccatctgtgttagtctgttttcatgctgctgataaagacatacccaagactggccaatttataaaagaaagaggtttattggacttacagttccacatggctggggaggcttcataatcatggtggaaggcagggagcaacaagtcacgtcttacatggatggcagcaggcagaaagagcttgtgcaggaaaactcccccttatgataaccatcagatcttgtgagacttactgttatgggaacagcatgggaaagagacctgcccccatgattcaattacttcccacctcccacaacatatgagaattcaagatgagatttgggtggtgacacagccaaactgtatcaccatccacacactgcagtgggagaagaatattggttgagttttgtgtagcccagcctggagagaggagaggcagcctccgcagtgtgggtgatccttgggctgagtcttgagggatgggtaggagcttacctgtcaggtgatggggaatggacctttttgggcagatggtagagcatgaccaaagcaccagcacaagacacagcaagggatgtgggacatagcaagtgctttggtgttgctagagcttaaatgcagaggagagtgaggggaaaggaagtaaggtcagataggatgtcatgggccaggttttgatgcctttatacatactatgttttcttccaaagtagggctaggaaagaagagtgagaccacaacaataaacaacactaacaacatcaataacctacatcttttcagttactctgtgcttactgtgtgctaggcacattttagaactctatgtgtgttaactcatttaatatgacaacaactctttgtattagaggacataaatgttaccctctggcagatgagggaactggaacacagggacctcagtagttcctctaagggtatatagatggtaatcggcagagttggggttggaacccaagcagtctgactccatagcccatgtgtttactcttgtgaaataccaaccttattacccttcacttacgaaggtttacagtgagaaagatcacagtgtggaagcgcaactggaggaggacaaaacaggagcaggaagacaagtcctaactaaggctatggctgtggagatggcgagatggggctggatcccaaggcattccaggagaatcaggaggggctgctgggcatctcttctgctccccttggtgctccctgagggagtttagcccaatgcccaacacacaagtgcttaattaacactggcagaattagaaaacttttcctaaacttcagcttcctcatctgtaatctgggagggttggcttaggcaagctcaaaatttcttttctgtttagaagctcttcattctccctgactataaatcaagaggcaaagaagacaattaatttacataaacctctctggttatatgatgagtaatggcctcctgccataatttttggttaaaaagggttgtgtcagttcaggtcctcttatgccaagaaaatatcaagacagaattagacataaaagagaatttattggggaaaagacccgtgaagaataaaggaaagaggaagcagaagtaggagggaatggtcttcagaccatgatgcctgtctgatcctgtgcaaggagggagggaaggaaggacaattgcatagaaggaacttcagcctgtagtgcagctccaaaaagccatagccaggttgatggagaacccagggcaaaaagtgcccatcaaagagttccatgatgggtggaaatagccaggctttagtatcctaatgctgtgtttagtcattggctgtgagcctgcccttgacatgaacattgcagcagatctgaaggtacagcagctggaagtggtctgccagctaaacttgcaggagattctcttgagggaaagtatgagtggctcaacttcatggctgctatagggtaatgtatggaaaaatgtatagaaaatatataaggagcaaggaatttgaatggaggttttgggggagcctcatggagcagtaagatttcagctgggctttgaagagtgggtggaactgacatatttggcagagaagagcctgccacgcatgacgaagatgcctagaaagagcccatgcatgcacgagttacaggaacttgtacaaagaggagttgttcagcacatgaactttcaattcttattttaatgtcatttctaacaagcaaaatatcctgccctgaagcatctctagatttactgcaccaatagtttccgtaagttctgttataactctcaattggattttcattatggtacttaaattactgaagatcattagtagtattttgttgtttgcagttaattgtgcaattgaacttgctacatttctgtaatggtgacatcagaggggctgatatttcccctcatgggagccctgttgcaattaaacgtaaatcataagcaaaagagtctttgctaacacacagttcccattcagtgacatctcttagaaaccactgttttcgaggttaaactgaaagcattgctcagatgcttcacggaatgagaccatcagcattaacatagatacaaactcatctattccaggcagctttacctaagagtggactgaggaatatctgagtatgtgtaactgtagagtgaccgtccaaaacaaacaccagggtgactttagacattttattgttgtccttccagaggaccacaagtgttacttcattagcatttattttcaggtaaagcgtctcagctctctccttattttacagctgtttgtgaaagtggctgtctcaatggaggaaggtgtgtggccccaaatcgatgtgcatgcacttacggatttactggaccccagtgtgaaagaggtaatggtttttaaaatcatttacgtaaagacatgctggtacctaaagctgttactaatttgcacagacattgggtctgcatggctacttcctgaatgttgctgagctttgaggggatttctcatttgtcattgggaaggtccctaggatgacaagacagcggccctgaatctatgcatgatattcggcaatgtttgtcagtccaagtttacctaaattcagttatttgctaatttggtggtactcagttatgagtgtatacataattaccagttggcatcaggataaaaaggggagaactttcttctgtaagggtaaggattaagctctttattatgccagtgaattaagtggtcttgaacaaaacatatgtatggaaagggagaatttcagtatgaaaagcacacctaaagatctgttggacctgttgggggctgtagaggtgtacaagctcagcattcaacactcaccatagatatattgagtgtctgctgagaagctactttgtgtagatggtttattcagtactcatcgcagcctgctagagtgtgtagaattatccttaattttgcatatgagaagatgaaggcacaaagaggtccagggatgtccccaaggccacatacataagaaacctttaatttgaatgtgtgttttgtctcttcaagtctaatgtttactgctgctcttaattaaaagaaacattctacctgatttgcctacctaaaaatacaagtatgatattgagatatgtgtggatatgcaatattcttaagtttttttccctgaactttggtcttactaataatcttgtctctacatttatagatttttttctcatcatccctagttttataatgaaagtttagaagttttatgttacacaaaactgtaattgaaaatttgcatgaacttttaaactgcagtaatcacttttagccaaagttgtatagacatcttattctaagatggaaagtaaagattcagtagcagatgttgaatatgtcatttaaaacatgtaatagaggaaaacaaagagcagagagtggtttgtgagaaattattttctgtctgtgtttataatttatctaaattcagttatttgctaataatgcagtaatacctatttgagcaagaaattccaggtcgattactttgattactaggtaaattacattgtatctctattaatgggaccactgcatggtattgatgtgtaatgcataatagacctttacattgcatgttgatatcctttaggagtccctccttaaactgcttctctttacaacttgcacagatgtgtttttattcgctaataattataatggtccagagtactaaaaactatttcttctaggcaatatcattctgtggccttattacttaatcagggaagttgtaggagattaaaattgttaatgtgtagcttgaggagtggtgtgtgaaaataatttctcagatgataatgctgggcataatttgttttagaaaaatcactaataagatgaagttacagggcattttacctgtaacattttacctgtaaccattttaacaaagtggttaaagatttgctgcaaagactattgatgctcatagttgatattgatgataacacagtctaaaataaagggcatgatattgaaccattccacagtgatttcttcaaagatttgatctttgtccaagattaagaaatgtcctgaatgggttaaattactaagctactaatcaaaactggcatgttactcagaggtttctccaagtttgggggtgtcttcaactgctccccttcaggaaaaagggctatcctgaaatctgcactaaggtgtaaatatctgttgactccatagaattttcccagtggtgattttcaaaatcaaattcatccccaagtggcagattttcaggcatttgtggtagtggagactggagagcagaaggcaggcttgcccgttagtagcagaagggtagtgccatctacccactgcctgttttacccacgggtacagtcccagaccttcaatgggagaagaaaaacatgggtgtcatttcccacaccacatgggagagaggagtctttttgattccagaattctatttccatttgtagagtcttcactgtttgctgctcttatgaaagtcacctgcttacctctttgaagaattagaggcagtagattctcttacttagatgtatgttcgtgatttcaagagtgatgaataaaaatctgataccgagtcaggacagatccatcctgaagtgtggggaagtattcagggtgacttccgatggtgggttggtatacttattgtggtgcttattactggataagtacctaggttggttgtattctgttttaactgggatgtgatgtttattttttaaagtgcagatccgggaggcctttactactttcctttctcccttcatctacattttcccttagtactctctccacatctctttttatagcatttactgcattgcatcaaaacagcaagtttccaatctccctcactagagcataagttttcaggagcaactatagtttcttcatcttcttaattctagccttactgtgtgatgcacagtacacgacccatagatgatgaactggattcatttaatagcatcaaaaaatctggagatataatgatcggatatgaacaagtatctcctggaaataattgctgtttgccaacagtcctggatattgatttcattggtttcatgctaaacagagctgattacaatgttgatatctaattgaatttggtcccatctttcagaagaatgatctttcaggtccacaagactgtcatttttcagttaacagggatgcaaaaaggaggaatgttttgatcaaaactaagtggcaataaaaacaaaagcaaaaacctcttatcatgatataatacacatgtaagggaacatttagaatgtcagttacaagtacttctcaggataaagatctatgtccctgggagaccttggaacttttatacattaataactacctcagagacccactatgagtgtgaaatacgcctttgggggtcatactggcaggatttgtatcacattaagccaataagtcaatcttaatcatccatgaacatagtattttggttttgtgatggagagaagcagcagatctcatgcttgaattatgaatcataatagtcatataacagtgtaataagattataaagcaattagtcttacttgcagctttttgtcattaagataagtttgtttaaaaacattcttggctggccagcctcatccccagtgggcaggtagcaatgatatattttaccattgccactaccattgtttctctacacccagaggataaaaaatagagacctgtggcttatttggcctgtgatgtctactttttaaaagctgaataggaatacctttaaatacatcttctagtttgtcatagtccccaccactacctattgtcacatcttgctcaagttcattcatttagcttaggtattagcccttgtgagcattcaagtttgccacctcctgctgctttctctgtcaaagattgtgtctttattttttttaaccacaagtttctttaatttttcttcctgtcacttttttttggtaagttcacatttgtggttttcttgttgcctcctactccgaccctttgccttctctttgcttgggccttgagcaactagtagaacttaatcacttcttagctcagtggtacagtatgttagcatttgttatcagattattgaagtgaggtcagtgcctgttttggcaatgacaatacaagctagtcgtatattgccatagttactgctaacaaaaaaactgtgtggaatccctttctcttgccatcttgcctcagaatgcacatttaaaatcttgttaaatgcctttgtattaaacacagtgaatcatatgagtggatgagacttttcagggtcatgtcaaaagagaaaagaatgatggagatagacctgaacttggagatgggggtggggtgtgatgatgaataggcttagggaagaagagaaacaaagagatacagcaagagaaccaggagagcattgaaccaaacaaacaaaaaggagttcaagaaataacttggcaattgttagactcatcgaaggtctgagaatgagaatcataaagcggccattggacgtaagaacagctgacatgtactgagtacttgcagtgtgccagggggtgtgctaagcacttcactttgatgatttgcaacaaccttatgagaaaagtcctgtaataagtcccatcttatggaggaataagcagaggcaaagagagatcaagtgccttgtccaagaagggacagcttataagtggtaaaatagaggcctgaacctagacattctggctcctaagcctgtgcacatagccactgtgtagtacttggacttcactggaaaggggccactcgtaactctaaagacctcactggaaaggggccactcataactctaaagacctcactggaaaggggccactcgtaactctgaagacctcactggaaaggggccactcataactctaaagacttttctgaggaacggtaagaagaaacctagaactatgaatcttagaatggaagtcaagatgaaaaggcaaaagaaaggattcttgcatattcttggatgtttcaaatgtagggttttggaatattcctctatttgattgatttcaacgtacgaatctgctcttggaaagagagagattcctgtgtgtttacaggacatataaatgtgctccaaaggactgaactaacatgcctggaagtagacatatggaatgaatattgtcatttagtgcagttatcatggaaagttatatcattttcttgtaatattacaacagctcaaaatgtgtttggaactcttttttggaggtgcctttacagaatcagcaatacattcaaatcagtgtgtgatttttttttttcccttttgaggaggcatttgagttttcagaaacagcctacagtaatttactgttaattctagtgactacagtgggtaatcacacattttagctgtttgggatcaaaagcagacttagatttaaaaaatactaaaaataattttctcatgtggttcataaagcacatggaattggtttaatgttttaatgtcaaactttatgtgagccagaggatgaagccttttggaagcataaatgcaaatagcaagaagttttctctcatttctccatctgaagctgctcatcatgtatcctcagaatattagcatgcacgtggactcttctaaatcctggtgcatttgttctgtgttaaattcctacccaagtctaaactgtgaagacaatacttggatttctgccaacttaagaaagtctgttggctgttatgctggctatcagtagataaagtataggggaaagcattgttgaactgatagccttaaggaaaaggaacaattggggccaaagtggagtagaataaaaatgagaggattgaaataatccttagttcattagagaagcagaacagttgaaagtgaactagctcttcatgcaggtacttgcttcctaggaaattacagtcttaatgaagctgaaaaggtttttgtatttgttagcacaacaatgaaacagaatagaacaaacaacagctaggttgattgtaattccacctccttcttatatgtgcagttgacgtttgagaaacttgtcctcacaccttgtttctctgatgatgtaaaaatgattttgcacagatatctttctaatgattttattgaatgactttcaaaaatactacattaagcagttgataaacacatattatataaatccaaaaaggcagcatctatactgtgtctagtgaatggaaaggactaacatgtaattatccaaatatataataatcagatagtccattttggaaacacctgcttcgaaaaagaaagtaaaaactttaccttatctcaagacctgtttagagagcttcatggaatcaggagctgattttcctgtgctttttttctcctggtgtttttcaggaaggtattaataaaatacagattcattattattttttctctatgtagaagtaagttttacagagctgcatttctgacacgaattttacataattttaaattgtaggtggctatcactaaagttcccaaggtaatgccacaggctaactcccattctccatgtgcctttggaaggcagagctctgtgaactatgtatattttcttctttccaaaagcaaaaggcagtaaactgtcattactaaactacactgaaggcctctatgaacctctcttttggtatttagtttcaatggaaagtaacaatgtggcagggcgtggtggctcacgcctgtaatcccagcactttgggaggccggggcaggcgaatcacgaggtcaggagatcgagaccatcctggctctactgtgaaaccctgtctctactacaaatagaaaaacaaaattagccgggcgtggtggtgggcacctatagtcccagttactcgggaggctgaagcgggagaatggcgtgaacccaggaggtggagcttgcagtgagccgagatcacgccactgcactccagcctgggcgacagagcgagacgccatctcaaaaaaaaaaaaaaaaaaaaaagaaagtaacaatgtgtagatagcaggggcacaatgccctaaatgttactgtgcgtctacagtggtattgcaacatttgtggcagctggtggatcactgaataaactagattttcctagaatagttccaggaattgcatcttttgacacacacactcgtttttttgtggctgggtaactgtatacactgagggcacacatgctcctctgtctcgcaggctgcacatatgtggtatgaacaagcagtggggatgggatgcaaccagaaagaagcttgatttttgtctcccactcactgtccctctcggcccactttgtaggctacttcttctcctgctggtagatgaaatcatctggtctgttttggactttctcccctatagttcctttaatgggggcagaggcatctgtgttctgactgttgctgacattttcttcctcagtcgctgggcatccagtggtacttccagcctcttgagttctctttgctgctccaaggagccatctgggaaaggagctaggctcagtccacatcagctttctttttggcggcccctagcttgttggcagaaaacattcatgcattttttctgccacgataaattgctggagtgcaaactattgacacgttagcaaatgctcattggaaccattgtccaagcatctggccagacagtttccaggcatttgacagtccctagtccacagtgtcctccagacttctggggataggtatcatgcaatctgaggagtctccctgaagcctctctcatgacttggcatcataatgtggcccttcaccagtttcccaggaagggctagtaacagcccagctctctccagagtaacccgcttcccatcacttgctactttggacatttgaatactcttgatatgcataaaggtttaagaggtcatcatcacccactttgcaaattatgcatcaaaatatcacacttgacttagaatgtggcatctgttcccttggtggttcaattgaaattttgattctaacattctcttgtgttatcaaagctaatcatttagtacaactgttaaatttagtgtcatggtttcatcttcaaaaacagtttttttaacttcatttttttttagctcttatgaacttattaaaaagataaaactaatttttatatgtcgttagccccacatttaatatttgaaccacttttcgatcttagatgttcaaacagtagaacagtactgaacaatagaaatataatgtgagccacatatataattttaacttttcttgtagccacatgaaaaagtaaaaggaaacaggtgaaattaattttaataatatattttatttaacccaatatatctgaaagttttatgtcaatagatactcagtattaaaaattatctatgagatatattgtattctcttttccattctaagtcgttgaaatccaatgcatatattataccacatctcagtttggaccagctaatatccacatgtggctatcatcttggacagcacaactctagaacttccagtaatacatatccaaactttacccaaagtatctactagatttccagttttctttcttttccttccttctgctgcttctccagctcttcagaaagcagcatcttagaaaatcaaagagaggctgcattgatatttgaaaagtaaaccattaaaaaaaagaactggggcctcagagctgagcctaatttctcaggttctctgtcttagtagaagtttgatcaaatataagtgataaagctcaatctcatgttatatcatgtcaattagatataacaactacagcatatatttaataaagccttggcactaagctaggcatgatgatagaatcatgagaggagtgtatggctcttgtcatgagggccttaaaataatttttggaaagacagacatgcatactatattggaaacagttaagtaaccaagcagggccaggatttagctaggcagaggagataaaggaaagtactacaggtaaagggaagagttagtacagatttagaggcttgtattgacctggggaaaagggaggaccctgctgtgtcagctttcatggtactggagcccttctgtgggagaagaggcaaaggcacaacgtcaactcacataactccaaagaagggagggcctattgcaagcttctccacgatgcccttccattctattgaactgtgcttctgtacaatttctgtctgaagcaggatattgggattaaaaaatgcccctttgtatgtataaattagtgggaagactggtctatttctgaaactgttttcactttcttatagacggcattcaggaaatccttaccaattttatatgcccaactgagagtacttcagaacacttaatgtttatgttcccagtagttatggtctctagagagtctatgctgtttttggtttatgaacatatgttggacaaatacatggggcttcatggtcccgacgatgtgccaaagtactttttgtagaacatcagtcccatgaggggttccatgaaattaagttgccatggatataatatcatttttggaaactccatcccatgtcttcttggggaggcatcgggtttgttagctcttgggagtcctgcaggaaggaaactgtttttacttagtttaactcacatctccaagcccatgaattttagaatttcttctttccaatttgttttcccttaacacctttaatgtcttcatcttggagatctggattcttattattttgacagtcattttgaaagtcacttgacatctgcatgacaacattttcatattctagatagatgttttgaatccatgtatgatcctcattttaaagataaatatttgcctaaatgtctagaggtttttggaggaagatcttcattatttaatcattcaccttttgggttcctaagaggattcatttgaccataaatttaaacacagcatgagacactcatcctttggggtttggttctcaaatactttaaagaatcatataggagagctggactatcccattaaataccgataacttcctagtttttaatggcttgatgtggtcagtgtgcatgccatcctggttctggttcttatcagccactgggggtactacttctagaactaggagtatgagatattcttagagctagagctcccttttctatactggttagatccttttctttcaaggtcaagtttaagtctcattctctccccagtcacttcctgactgtaggaggccagcccccaaacccccaccccaaccagccccatcagtttctatgcaactttgctgacatggccacctctggcctcccggaccccacccacatttcagttgctcagtgaatctattaaatttttggtttttgccattcactttaaggattacatcagacattttagcatttttattcctccaatgaattcttgtttttcttgcattttattacattttaaactgattaactgacccagtgcttgtctctggggatatgtactcatgatttttaaatatttactaagaggtaaagaatgagcatattcaccttgtcaaaaaactttttttccatgtgcatttattgatttttgtgttgaaatacttctatcagcataaaaccatctagaattctgtttcatggcttcaggaagccttatcagcaaattgcaatatttaagtttccttaaaaatattttctttactaagtgaaacataaatcatctattaattttaaaatatgaaataattatataggtattatttcagtattttctttaaaaagtcaatttggtttatgagtcccatcatctgggaattacacaattggctaatctgcttttgggactactaaaatagaggtttatgtatagtctttcagtcagactatggtactccccataggtcaaagactagaaattagatctgatacttcttcctatttcactaccaagcttagagctgtgaagagagtaggtatctattaaatatttgttgatttacataatttaactgtgggctcttgaagtcgatgagagggagtgtttaaatgttaaatacatctgtttaatccaacattctaagaaaagacattctggacaacaatatttataaatctatgtgtatgttatatggaaatattagtgtagttatttataactgaaatattgtaggaagtgaacgcatgaaaaaaaatgttctccaactttcctgccatattccctcggtgataatcttttgtctctgaactgtttgagaagagctttataagtaaacaatagattgggatatttgttttctcaggaaataaagaatgttctaatggttgagtttataagatagatccatttctatctctgtccttagagagcccttatcttgttgcctgccctctcctaggaggcattgttgacctttaccattgtaggcactgaaccacgctgaaagagaagccttacaggatggaggcaacttttatccaaattgaaaatgtttttataaacatacattagctcttcatgaaccatttgtttcctgaagtcccaatggaaatgatcatattctgttagggattccaatgatatattctttaaactaagactcgtgaacgttaaaaggcaaaagcgaagccagaagtaaattttgactcattctttatataatcatttgaaaacttcacttgaaaactggagaaaattttggaactttcttgttctactatggagaagataaaagcagaagcatccacagtatcttaatgatataaaactggctttggaaagaagtatgtaatagaattcagattgtccttggaggaaaacaaccctaaatcaccatcgaaaattctttatttatttattttttcagacggcataatttggagtgggattgggctatttcttttcagaccttatttaggcctcatttctttctacagtgttctccacattgccaagcagaataagctatcacaaaactaaacaaaaggcagtgcctagaaggcatcccatcccttgacggagccaactgggagtgtacccaggactttcctgttctcatggctcctggggttgttattctttactttttatgaatgagacaaaatgatagtgaaattattttcagaactaaatcatatctcaaaggagtcttcattccaacttgtcagtatcacatgacaatcattttaatgttttcatttaaaatatctaattaggaggagttgtgtttttctaattgcctagccattcctagaaaactgatcacgaactcacgctctgaggataaatcttgctacttgctggattggtggccttgagcaagttactgcatgtctctcaggcacagtttcctaatctatacaatgagggtaattatagtatttatctagtaagattgtcaggaagattaagtgagatcatccacaaagtacttagcacaggatctggcacataatacatgtataagaaatgttaactattttaaattcacatgaaaatgagggtaatcttggttgacaagtatcatttcattaacagtatcatgaaatgttcacatatccctgaaattacacctaaacttaaaggcctcattttgaccattttttccacttagaagttttgttattttacttgaacagcgtattttttggatcccctattcagatgaaacccaacattcttgagctggatatagaaaggtcaacatcaagaaagaagcacatcaaccgtgtgcttttctttagtacacattcaactgttgcagttgtaatgaaggctaaaactacaatagtgcaaatagtaataaagaaagagaaaatgaaggggtaaggggaaaactatttccataaaatgtaatggtgactgtgtctgggaagcatttgttctcccaatagctaaccaaaaattcctgaaagatttgcttacttttactgacatacaggtacagaagggaaaatgaacttgtctattcagaaaaggccaataacgaaatataagaggtacttagctattttagaaatgcggcattctaaaatcaatgagaggtaatagacacttacccatcagtaaaataaactgaacatctctgtaaagtatacagtttccaggtggctgtaagaccttaagtctacaaatacggcctggtcaggttggatgggagtgggggatgcttttactcatggaaccatgtgccattcttcttttgttgcaaaggactaaaagtgttagtcccagaggactaaagttagaaaaatcaaaacatttggttattttaaacccacaaatttcaagctgcccttgttagtgttcagttttgttaagtctatccataaaaaggtgtgatgttatgctgaaaagaaattgttctaagacgaagagaggaggtgtgagtttatctatcatgcatgagtatttctcaggcactatgctaatgactggagatgtataataatgaatgaaacacacgcatcccgccttctggagtcacattcctgtggagagatggaagcagtgcttagaagggcatgtgtaggaaggctggccacacattgagaggtgtgcagtggtgctgtgactcccacgctgggaataggagctctgtacatttttctatagcacattagaagtttgatggctccggctgaccatgagactcttcccagaggagcctctggaataccaactttgttaagatgagagagctcttcttataggtttccaatgcccttcaaagtcagagggatcttgagtcttttgctgcttagattgcttttcctctaatccttgtgctcccacagggactctgatccctagctttcccccagaaacgttaatgaactggaactcaagtgtccaaaaaaatgcaagtacaccacaaaaatggtttgtttaggcgtcaaacattttgagataatgcatacttttgaatggatgcctgcagtcttgtccctggggaacgcctttggatgtcatgcaatcctggcttcagtaaatcatttgctgtttggacaagtcgtggccaccacgtcagtcactagatacatttgtaatggtttacgtgaacaataacaacaaccacctagcaacacactgtttggtcatgtcatttttttctaataccacatgtggttttgtgggctttagaagaataaattcttactgcatctaaaaggtcttgaaaattaaacagcaaatattgttggaggcctactgtgcacaataggtgaaatcacactgcatgttgtaagaatgaaacatgggtctttgctagtttattagtaattttatactccacacgggagagactatttctgttctgttcaacattttaggtctaatgcctgacacgcagtagcccagcaagtatttgttgactggaaaaatgaacaaatgagtagttttcaggcatagtttatttcttgaatttcctgtaattcaaaaaagaaatgactgatctaccatctgtactttttagccgatagttttttccctcgactttttaaaaccatgaacacaacagtgtcaggtagagccaagtgtattctgtgaagtgttaatacctcagagatgccacatttatgtcatcccttccatttatgcagcacttatgaacatataccaccttagtcagtccttggggcaacccttcatattttatagcaaagagtgagattgaaggggaacctctgtgactcggaattctaaggcaggtgtctaggaatgagacttatgtcttctcagtcagcccagactatggggcatctatattctccaacatgtatttgcttgcttttagagctcactgtggtcgctagcattaccttttgttattattaactatcttttaattttagctctatctttgttctttcctctcatttttcacacctttttgattttcagtcagactgctgacactttgctatttctgttctctgtgtctcttagacactatgtccatttttaaaatttcaaatttgagggaactaggcaatatttagaattaattttgtcaaggagagcttgtctttaattgtaagtggatattatgtggtgaaaacacttggcttagctgaaattgagctgtgcatagaatcagaagacaatctggtcctgaaggagtctgagaacacacaggcatggataatccggatgtgtgaatgaatgaactgctgctgtgtcacgctgcccgggacatccttctgttggaatttctgtgaaagtagaccaggcatattgcatattggagtgtgtattccaggaagagttgagaattggttttcttttatgacctctttgttttcttgctgcacgtatcaggagatttgcagtttctgtcatataaaaactactggaaatttagaattatctcctctgagagcatgagccccttgagaacagggagttttgactgtctaattacagtggctagaaaatgtctaacacagagtagatggtcaatacatatttgttgaattaaagaatggatctggcatatatacagctgatcactttttgcaataggacatgggttgatggtgtagtgcatgatttgttggtgcattgctgtgatgatgttctgagctcacccagcctcagttactcaatgacagcaagttcaagtcatgtcagagttggtgtttggctcttgtctgccccactatacaagtgcatgcagttttagtctctgttttggtgggtagtttcctacccctctggctcgctatacttgattatgaaattataattggctttcgtttatctctttaggatagaatagtaactgtagctaatctgtggctgaaaatagggagataagaatgaaaataattaaaatggatcactctgggtagcctgaagtgacatggattaatgtactatcagttttttccccctgagaaacatttggtcacaaggaagtttggctttcagaagaaattcagatttgggtgtgtggcttttggcatagtctagcatcactggaatggcctaaagtagatgtttctttttttcccatgccttcctgtgggtgctcagaacaacccggtcttttgactgtagggttatctgccattcgtagactgagcattatcttgccaagtcatatggagaagccagttaccgagtgcacttggagcagaagataatacttggctgaagcatcctagaaagcctaaaaagcttatgtcagagggatataacgtagagtttctaaggagaggtggagaaagagactgattgatcgattgcttgatctccaaagggcaggggctctaccacgtgtttcatagtgctaggaaatggcaaactttaaaaaggtgttcttcagttgccccaagaaatacaaatgtcacgcttgtctgactgtcagggatgaatggtcctagtgcatgcatgatgactgtatattcttctttgatagcgccatggtgtgggtaggtatgaggatctgttggcttagaagcaattggaaaaactggacaaggaaggaaaagaaaatgaaactaagaggctggattgagaaataccaagaagggtggaaatttcaagctttttttaacttcagtaactgtaagagagaaagaaagagaatgaaacagaaatgtctgactgtgtcccttcaatttcaaaacatattttgtagctctccactgactctggtttattcattatttatttaatagactcctttgttaacttcaggaagttaatactagtggcaattcttttagtcgtattgggttgctaaaaagctgtggaccctaccacataccacagtttagattaattgaatctaagtgtgcatgagtttgattaaatagggatttattattaagagcccttcttaggacatatgagcttggaagagcctgatttataacttagtagctttttcactttgtgaagggatgggacataaagtgttcttttccagagtgatgtggactgagataagatttatagattagtgaaagaagtccacgtctcagtcaaaagatttccagaaatgttctcctcattattcttcagagacctgagctattccagatgtccataggtttcagaaaggtagcttctggggagttgagactttctaaaagatgaaaatgtcaaccttcttccttccctgcttttttgagatggtagtagagctatatattcaactgtatgtagatgaaattgtaatataagaagaaaaataatggccattattaaaattcagcagtaggccaaacaggaattatataactgttttgcttcatagatagaattgttcctaaattcagctgatatggaatttttaagaatttattttttggggggtcaagaaatgttctgttgtaagcatgcaaggaaaaacttcttattctctgctctaattgctacatccagatatttgttatgacatacaagcaagattcagtgctcgtggtgaaatctctgtgcctcaaattgcatttgccctgcctgccctcctttcaaagctgtgcttaccactttggtataaggtcactgaaagtgtctgcgagctttaacaagttggagatgcatttctttttttttttttttccccttttttatttttatttttattattatactttaagttttagggtacatgtgcacattgtgcaggttagttacatacgtatacatgtgccatgctggtgtgctgcacccactaactcgtcatctagcattaggtatatctcccaatgctatccctcccccctccccccaccccacaacagtccccagagtgtgatgttccccttcctgtgtccatgtgatctcattgttcaattcccacctatgagtgagaatatgcggtgtttggttttttgttcttgcgatagtttactgagaatgatggtttccaatttcatccatgtccctacaaaggacatgaatgcatcattttttatggctgcatagtattccatggtgtatatgtgccacattttcttaattcagtctatcattgttggacatttgccattgtggaagtcaatgtggcgattcctcagggatctagaactagaagtaccatttgacccagccatcccattactgggtatatacccaaaagacttggagatgcatttctacagctgacatttttcacttaaaaataaattataggatgcgctttggagagcacacgcctaggagtggaacattaacaaaggatacgtcaaaccacagacacttctagtggatccagttcacagtattgccacacagcctgaaaaaataacattagtaccagcaaaactatcatccctaacattcagtcattatccctgtggacaggcttgggaacagccatgtggatgtagctgctttgtgcttcttcccatgcagatttgatttttctttccactttctcccttttaatgaatgaactaaaaatgaatttgaactacttgccaaccttagaaggtttgattttaaaatatattttcttctcaaatacacgaaccagtagcatcactttcaattccctactcccattctctgtccaaaaatacatatgccaatcttcaattttttttttgtagattgcatgtaaacgatggttggtttgtataaagataaatattactttagtaacaagcacatagtaacagcttaatttctttttgaattgttaggctgcacaaatcaatcatgtggtgccagctgaagactgcttttacaacaagacatatgttacaaatatattaatcttagcggcatatggcacctgagaccttgtaggaaggcgttgcaaaaaggacgatcatgccctattagctggctcacttcctaacttacattaattcgtgcattatggaacgtcaccaacacatgaaacaaaaagtagaaatggcactgctgagtaatcacaagccattgactaaagaaacttcagggaaggcggggcaatgagcattctttgaaccacttaattcaagaaataacaggctttgtttatttaagaggccagtctgtctgttttctgattgcattcttattgtgaaaatgccagagcatattacaatggataaaatgagaggaaaaaaagggcgatttaagtaggccaggaaagagtggtggtagatgtttgaatgcccccccttggaattaatcagtggtttataaacctgaaatactttttaattttgagaactgagtttctgactcaaattatacaagagaaaatgttacttggcttgagaaaggaaaaactttggttcatgtaaatatgtaccctcatgcctttatcatgggggaattgtaattagggattcagaatcttgagaacactattgtgacctagttatttctgtacagcaagtgctcacaggaggtactggctagacctgaaaataatgaattaagagattccagctgggatgtgatgaaagcatttttgggaatctctgtatcttggctggaccacatgggttataacttggagagacctaaacgagtagtagtatatgacagatttatagtccaattgatgttgggcatcagaaaaaaaggctgaggttaaaaaaaatgacctgagaattatgagttctaaaagaattgctattggaagggatgctaatgcaggaaagcatgaattccttatatgagggcaataaaaataataaaatttggtgctgaggcattgaatgggaaacacagtagcttatttttcacagagacccctcctccaagatcccttatctaccttctctgctgtacagttctccacaacacatcctccatctaacatatagtatattttctgtctgacctagttcttccatgacattattaaactccatgagggcagacattttgtttgccactgctcccaccatcccccacactttgttgtatccttagctacaagagtggtgtgtgacacttagtaggctcttgataaaaattgttgaatgaatgaatgaatgaacgagtgcatcaatggtgtcatttttaagccagaaattcattttagtccctctcttccctgcatctatctctccctccctcccaccttcccttcattcctccagcaggcactggatgtgctaaggcacaaagaccaataaaacaaggttcctgccctccagcttatggtctgttgggatcaacccatgggtaaatgaaggagtccagtacagagtgataatgctatattagacatgtgcacaaagggagatcagagtagagggggaaaaaaacatttaatcaggctgagaggtcaaggacaatttttttccagagaattaaggattggaaaattaaggatttgtagagcctaaaagaatatgtaagagttgatgaaaaatgaaatgacttgcaagaaaggatacgacctggaagaagaagacaacgttgtcagggaaacggcaggtagttcaccatgaagggagggagatgatgggagcagatggagtttggaggtaagttaaatggagagtcatttcaaaatcattggttttccaaggtgttttgttgtgttcattgagagtcaacaatactgagacttcataatacttcagacaagtaggtgagaccactccatgtgagttttggtcctcttgctcttctgtttcccagtttactatgtgccccttcccagcttgatatgtcaggctaagaagtaagtggactttctgtttctattcttttacttaggataatgctttccagttctaaccatgatgctgcaaaaaacatgattttattcttttttatggcagagtagtattccatggtgtgtgtgtgtgtgtgtgtgtgtgtgtgtgtgtgtgtgtgtatctcacattttctttatccagccctccattgatgaatccttatgttgattctatatctttgctttgggaatagtgctgtgataaaaatatgagtacaggcgtctttttaatataatgatttctcttcctttgggtagatattgttggattagttctttgagaaatgtccatactgttttccgcagaggttggacagagccaaatattacatgttttcacttataagtgtgagctaaacagtgggtacacttggacagagagagtggaatgatggacattggagactaccaaaggtgagaaggtaggaggagggtgaaagttgaaaaattacctattgggtacaatgctcacaattcagataatgggtacagtaaaagccagagtttgccattatgcaatatgtgcatgtaagaaacctgcgcttgtaccccctaaatacatacatacatacatacatacatacatacatacatacatacatatgtaaatacataaagaattgagcggagctctaaagctggtttaccatttccttgccagagcattatttggagtgtggagactttaacatttaatacgagttgcaagactctaaagtccatgctagagcaattgctctttcatcctcattttgttatctgtgattgtgggcaggggccatctctgaaagaatactcctgtctttcatggtatttacttgagtttatacttcgtgtcacacgtgaactatttcccgtctctaatctgcaaatgttcccttctggaacccgtttttatgtttaacctataggaatgcctaactgttgagtaaaatggtgcttttgtgttattttcatctaacataacctcagaattttagtagattttagtattaatatctttatatgtgatgcagtcatcatcaatatttgttcttttaaattaacattcaaaattaaatgaacaaaacaacagtgatattcataaaattggatgctattttgtgtcaggcttgagtttccaaatggaagcctcctgattgtcctgatctgatgtcacatggaagccactgcatactcttgatcttttctatgtttctaatcattttattaacatttcttggaatcttttctagcttattgcatttatattggctggttttatagtgataagaagattgagagctgtttaggatatagatgttatctgtacgtggtgcctgtacaaagtaggtgcttaatatgtttttttttttttgaatgggcaagtaagagttatatttttaaaacatgcattggatcattaaccacttcctactgcctttaggaaaaagtccagactcctttgccagagccaccaggccatttacaacctggaagcagcagaccttttcagccttatctcttgctgtcacaaacaacaatccacaatctacagtatatgtttgcagtgccatgcttcatccatgctgctccttccatttgacattcttactgatttgtcagatgagaaagcttccattagccattcacagaagaatcacttctctatttccaaaacattgtttgtacttccaggataatcacactggttcatttcactgtctatacttatctccccatctaggttgtacactcaagacagaggctctgtcttacttacatttgtatctttagggtctaatattgtaccactgaccattgcaaggactcaggaatgtgctctgaattaattaacaaggtaattaggccagtgccacagcctgagtatcacacagcttcatggtctctgctccacaccatgagaacaggacccgtgcggtcgggacaaggctaaagaggcctaaccctcagccagggctctgcaaggctgcaccaaggctgggtttaatctgggacccctcattcatccacagtcagtagaggagtgaccatcactggcttctaaaaatccatggcgtcctggcctgtctgcacagcctaccctcatcagagaagagttctttgatggtactgcccagggtctcttgatagcagaggttttcctgggggagcaggctcagtcaaagcctcagtctggttctgatggttcctttaattgtttgccaagaatctggttaaagggaacatgacagacttcaagggactgatgagaatccaagatctccttgctggccacaaatcattaattgagagctatgccttaggagggtaatatatattttctttcttatgaccatgattttacatgtgctgaagcttatttagtctttaactctccattcacttagccttgtaagacctgttttggaataatcttaattattattgttattttaaaatttagccattgtccttttttatttttataacactataagccatattgtttaatttacaatttattatattctgttgtgatatgagatcatagtgatggttagtacaacaatgtgatagctatcactttatgcaccattttaagattaatgggcatcatgatatgagttatagatatgaagttccaatgtataatttgagctgtgttgtgtattctgggccataatcatcacataactcagcatatgtatatataaatatatggaaaaacacaaacttgcaaaaacaatttgagacaatcccaaaagatagatctcaaagaaagatttctttcttagttgaaacgctttcttagcctcctgttttcggataatgctcaaactccttagtggaccagacaaagcctcccatgagctggtctttcccacctcgctggctcatccccagcaggtgcccttcatttatctgcagaaccatgcccacatcctcccattgttcccccttttcacacttaacagatgttcgcaactagtctacttgtctctgtttggagcccttcgcctcttgttttttaaaaaaatttaaatgcaaaacagtgcagtgactaataagacaaccatatttaaactgtctacctggtattaacaaatgtcaacatttcatgaattttaaatgaacgaaccagagcatctcagataaagcttatgtccctctttttctccctagttcctttgccattcctctctccagaggtgactgccatcatgaatttgtgctagagtttttaatcttgtcaatttactatgtgtatgatttcgtggccatttgtaactgtgtagattttacttgtacactttctctccaagatttttttaaaaatgccgttttagacaatccccagtactgatccttgggggctctttgcttcctattctttgaggggtctttgtttttttttttaacaaactaattaaattgttgcttatttcttaaaaatttttttactgtttctggtctggagcttcttcagtgattttgtgacagtcttggaaaatctaattttaattctcccctttattgaaaacttggttggccttttctttttctgacctcctcttgcccctacaaaggtagagatttaataatacatgatttctttttacagaaagcacattacttatttattagcttggtagtttcagcattgagaatccttcatttataatgttcagaatttttctcaaagaccttttaacatttcgatcctttacttaagaaatcctgatatcaaagtaatccatattcataatagataatgtgaaaagtattttttttaatttagaaaagtgcagagaaattggagaaaatactcataggtccctgagtgactgctattaatgtttaatatgctcatttaagaaagtttgggaagtagcgaagaaactacctaccatactaatataatcacagttaatatttgcctgactatatttccttctagtttctatttttctttacatagtaaatttctttgcaatcacaacataaattcagtttgtattatatgttttccacacatacacattttaaaatactatataaccctgtgttttcattttttaagcatttgggctctacccttagctttaatttttttctgttatttcgttatgtgtaacatctttgaacacagagtgttttttgtatttagaatggagtgaaattgttggaggatggctacaggcactttaaagcccttactacctattatgaatgtggtcacgtgtgcacctgcatgtctaagttttggtttcacctcattcttgccatcatagggattttttaaataataaaaaagaaagaaaaatccttgcttattcccaacaatagacatttactctttattgaaataggttcttaaatctttttttaatcttctttactttaaatatttttgcaggtatttaaatttgtattagtgtacatatatttttattttcattttacatgtggtccttttcctcgtgatttatctatggcttttaagattagaaagtctttgtgctttcaaagattcaataaatatttttattcatgttcttccagttttttgtggttcgatttttaaatatatttgatgctttaatctaatttggatttgttgtaggcctaagacagatctaccagggtgccattgttctgctatacctagtttaaaccagtgataaatgctatcagtggtggatggatgaattccaagattcatttcacattttgtacctgactctttgtaggagtgttatttaaatcaggctgatgggtgttgctaaaatgttggaccagccttggacttctcatacccatgctgacctgtggctcagtgggaatctagcatttgtccctgaacgtgcattgcccttggtttctgaatagcctccagctagtttatactagatctttggcctttctctggggcttgtgaactctgctttccagcaaacaatgtaccctcactattagtcaacagaccattttccttaggccctggaaggcctataacacaagctccttcatccacaggcagaatcccttccaatcacctttcctcttggatctgcccacccatcccctgcagcctggccagcagatgccagtttgcctgggctggtcagcacattcacaccagctctctctccttagctgactgaaaggctttcttttttagctccatgactgcagaataaataagagcaataacattgctcttttgttttaaataaatgagtatggggcaagtgattcaatcaataactgagcaagaattgacttttccagtttaaatgtagtgagcaccctatcacctagagtgttcaacagattcaggaaaacattttaagaaatgttagataggggagtcatgaatttcatgaggatgactgtctccataatcttctcaccctaaggttctgaagttacgtgagtatctcatttcacacctcccttttttttttttcaaagttttcccaacatttacagtagcagaggcacaaaacaaattttttgcatgtgtatttatgtatgtgtatacatccttttattgatctcttcatgaaaaggtaaggaatgtgatatagatttatgtaaagaatcttatttgctagaacgtgatgttaatgaggtcataaccgcaggtttgatccttagataagccaactgtgttaagtcctaggattagtttggaaaaaatggcttctaaaaaacaggaaaaatatgattggaaaacaggtttagtatctgccccaggtggttagatatataaagcttacttatccagtgagtgtaagaaaccaaaaccaaaacaaacagaaagagtattaagtccatacagttgagatagaagtagaatatctgaccacagacttgtaggttgtattagttgacaacgtgtgcatctttttaggtaaatataagaattggtttgtgaattgattttttttttcaaaaaagcatcatggaggtgtaatttacataccataaaattcacccatcttaagtgtataattcaattcaatttaattcaaattttagtaaatttagagttatgcaaccattaccacaatctagtttcagaacatttcggtcatcccccaaaagatttcttacacctgttggcaaaaaatccttgctctctcccagagccctgggcaaccactaatacactttctgtctctatagatatgccttttctggacctttcaaataaatagaatcttataacacatattattttatatttggcttttttcacttggcataatgttgtagcatgtagtttattcctttttattgtggagtaatattccattgtaaggatatatcatattttgttcatacattcaccagctgatggacattttgattgtttccagtatggggctattatgaataatattgctattaacattcacatacaagtctttgtctgaccatatgtatttcttctcttgggtggatatttaggtgtagaattgctggattatatgccaagtttatatttaactttttaagaaactgcctaattattttccaaggtagctgtaccattttacattcccattaaacaatgagtgagggttctagtttctccatattctcacaactattttactgtctttctttttcattataaccattctagtggatgtgaaatgatgtcctgtggttttcatttttattttcctaatgattagtggtgttgaacatcttttcatgtgcctattcatgtatcttctttggtaacatgtttactctaatgtcttgccggcttttaaaattgggttatcttcttattgagttgtaagagttccttgtagtttttaatgcaagttctttatcagatattggaaatattttcttccagcctgtgacttgtctttttaattttcgtaatggcgccttttgaagtataaacatttttaattttgatgatgtctaaattatcagtctttttcttttatgaattgtgcttctgatattttatctaagaactctttgcctacccaagatcttaaaatttttctcatgttttcttctagaagttgcatagttttagctcttatatttaagtctgtgatccattttgaattaatttttgtatatggtgtgaggtgagggtcaactgttttgcatgtacatatccatatccaatgttactagtactatttgttgaaaagaccatcttttctcattgaatttccttgacacttttgctgaaaatcagttagccgtaaccagaagggtttatttctggcctttctattctgtttcattgatctaatctctgttcttactctagtaccatagtctcttgattactgttgctttgtagtaagttttgaagtcctccaactttattcttcttcttctaaattgttttggctactctgggtcctttgcatttccatataaattttaccttcaacttgtcagtttccacaaaacattgcattgagattttgataaagattacctttaatctacaggtcaatttgtgaagaaatgttaacagtattgatttttccattctgtgaacatggaatgcctctccacttatttaaagatttttcgacttatcttggcaatgttttgttcagtgcacaaattatgcacttttgtcattagatttattactataaatcttattccttttgatgtaattgtgaattgaattgctttgtaatttaattttctgattgttcattgttagtatataaaactatgactgctctttgtatactgatgttgtattctgtgacttttctggactttttttttttttttttggtagattccttaggattttcttatacaggattatattgtcttggaataaagatagtctttctttctttctttctttctttctttctttcttctttctttctttctttctttctttctttctttctttctttctttctttcttatctgtatactttaatttcttttctttgcatcattgcactggttagaaccccaagaacaatgttcaatagaagtaacaagaactgatatccttatcttgctcctgatattagaaagaaagcatttgttatttcgccattatgtatcatgttagctgtaggtttttcgtaggtacccttcaacaggttgaggtagtttctttctgtttatgttttgttgagagttttatcatgaatagacattggatttcgtcaaatgcttggtctatatctattgagatgatcatgtggtttttgtctgttattctattaatatggtgtattacattaattgattttcagatgttaaactgaccttgcattcctaggacaaattccatttggtcatggtgaatacttctttttatatattgttggatttggtgtgatagttctgtgttgagggtttttctgtctctgttcattgggaatattggtctgtagttttcttttcatgtcttcgtctggctttggtatcagggtaatcctggctcacagaaaagttgagaagtgagccaatttattttttttaaactggtctcagttagggggaaggaaggatggtacacaacagtgtttctctatctatgatgaaatttcatttaaaaatcatttcttatcttgtgaattgatactttaaaaatataataaaactgaattactagaaaagtcatacaaaaatatacaaataaaagccccactgatgaattatattcagcctatattaaattactccatgaaattgataaaaacgttcctaaaggtttactcttaatttctgtgtttacctcatcacagactggacacaaaacagttctcacaaatctgtgaaccagcttttagtctggtgtaaagcactggtgtaaacccatgcttctcaaactttaatgttcatagaaatcacctggggatcctgttcaagagcagattccgatttggcaggttgggggcagggcctgagtctctgcatttccatcaaactcccgggtgatggtgatgcggctgctgctgggccacaggtcacactttgagtgccaaggctatgaaaaacaatgcagacagcaacgtaaatgtgatttttaaataaccctgtcataaattgctttgggacatattttggattttccaagattgttggattgttactcagctgtcaggattctctagatatcagttgtttttcttggcctgtgacctttctgggtctccagctgttcctctataaatccaaggggttgaactagaagatctctgaagtcctttccagatctcacagtctatgattttaagcatccatgtcaaaggagaattatggtttcatttgcattttctttttgtataaacctaataaaacatgaacccaaagttttatgctacaacagttcttaacataatgttaaaaagtaacagtaaacatgctttactaaattttggatgattcaggaagattagtgtcaacattcaaaggtttttccatgttgaagtcttgaagagaaagggtgggggtcttgtttaactttatagttggaaatccaattaaaaaaataactggcttgcttaaagtgtggagacacaagtaaaataggtgtttatattatgaaattcaagttgacacaaaatagctgaaaggcttcaatttcagccaagttgaaatgatgtcattgtcctttatatttcattttatttactgagatacttgaaactttttcccctgttgcttaaaagcaaatgaaaagggtggtaaatctgtggtggaaatgtgttgtcaaaacctccaggggctgtatcctcagccttcagcacatattagtgtgattctgctattcttactacagatgattacagcaaactctgcaatgaagggtggaggcatttggtcagcctccaaagaaagtgactaatatttgacctaatgtacagagtacatgaataacatattcttagggtaagaaaaaaattctggtttacagggtgtgtaagagttcatatttctttttcaattcttccaaaagatttaaaatactcagctgctctattaaatttttaattcctcaggctcaaatgcaaatcatgcattagatgccattattcaattcaatttaagaacagactcttgccccaggaatttattaaaatagtttagaatcttgaagataaagagtatcagttttgtgagtttgtagtaccctcattcttcaaaacagctttttcgttttatacactgttgagtaatggtttccctgggtacagacatttgaagtctacaaaatatataggagtttttatttgctgagattagtggaaagttagcattttctttttctttttttttttttatcacattgaacatcatttaaataatatacttactgtatttctgttatttttggcacaatattttacttggtgggtttccttttattcatttagtaataatggggtcagcttggcaggccttttgtttttaattaactaacacatgattgtgttatgtgttaagatatgttcattaatgttaggaaaaacacagatgaaaatgtttacagtggttcactctgggtggtgggattatagttgaatttcattttctgatttctaattttttgtgtcttttgaatgttctacaaaggccacataatttttttgaattagaaaagaccacaagtataaaattaataaaagcttagaatttctagctttatttctctctggagaaagggaacttttcatgtatctatttaatatgtatgatgcacttactatacaccatgcactttgctgggtctggggaggaataggggaggtgagagacagctgtttcccttaagctcagttctagatctttatctgaccaaggtatggtgggtggggagcaataaatgatatcccccaatgaattattaccatcgtaaagtggtaatcattttatgcttctcgcctggaatttaaagaggatgaattgagattctatatgtaaggcacttggtctaatacttggtacataggaaagtaatcatgattactgtgctttgcacattcatggtgatgaactcattacctctggagttaggccggtctgtttagatagcctgggggaaaggtgagaccagatacccaggtgacattcatctctgagatacctcccccatttctgcagttattcttccacgtggcatccttttaaataccaaccactaaaagtttggtttattaacttaattccttccaagccaagtttctgttgggacctttctctgagaatgcagttctagttttatcatgaaggatagtgagaaactaggatttattatgtagttgtgcaactataaatatttatttcatcgatatgtgagggccacctgggatttttgctttttaattaattaaattaattttatattaatagacaataagcatttgagaaggcaaagatatacctagacaaaaaaaaaaagtcctgaatcactgaaagcagtttagacagagacattgagtccagaaacttcaacttaattctccccaaagtgtcttttctgtgaccccacaacaaagcacacacaaaaccgcattggctttgtatcacagaaatgctttcctgtcccagcagttgattctaataagtttgttttattgatctggttgcaaggggtgctgtccaacaaataatcctatacaataaaaagccttctcaagtgactgttgaatagtcagggtggtgttggtgtctgtgtgatgatgaaggtgatgggtgagcaaagttcagctaatcacagggttattgttctatggtgaggcagccacagcgtcactcttgagctttctgcatgcctgcctcccataccaaacattacagccttcccctaaaacttccagaccacccactggaacaatatagtatataaaaggatccagatgcttggaaagagaaagggtgaagtgcagagcatgcgtgatacctgctcgttggcccttctagattttgagcactgtttttacatagctggctcactaaagagatcaaacttcatctccaagtctcattttcagagcattttttgaaatatatcaagattaaaatgtatcacaaaaaatctgcatttttaaaattgttctggattcaggggtgactgtgcctctacggctctgcacctttcttcagtattccccagaaaacagggggaaacaaatcgttgtaggatgtgcacacacgtggagctctaaagctagacaggatgtggggaatagaggagagagtagagagtgtcaaataacagagtgatacccacgaggaaagagtaccaaatacatggggagcgcccgtttgcagaatggcacaggagagttggctaaatacacataacttacacttgaaggcttaattgcttggaaatttttaaaatattttgttttataaatgtatatatttggaacttaggctacttggtagctttgcagtggttcacctggtgaaatatggcttctcaatctgtttgttcaaaacagatttaatagatagggtttttttccctcctccctgcctgctccctgcaggacagctgatttacaagaggcaatctccttcatatgatactcattaattaatttatttacctaaccccttcattttctctcaccttcctctccagtgttgcttccttagtttctctttatcacattaccattaaaaatatttacctaaaagtctctttctctctctcaagttagcttcagaaaaggagagctggccgcctgttttcacccatatcttcagtgcctagaatagtgtctggcagacagtaggtactcaatgaatattgatgataaaacttagttcatgaagaagttctagacaggactatgagtaaaacatcttggttcatttgattgttcatctgttcattcattcactgtctctcatgtatctattgaagacatagtctgtgctaaggactgtagtactaggtactgggcatataatcctcctctaaaggactttacaaatagataaaaacatcttcttttggtacaatctcttcatttaaataaaagactaatgaaaattagatttagaatgtttcattacaaattttagagtcctccaaactattgattaaaacaatacataaatgtttcccttccagtttaaattaaatcagaaagcttgtgtgggctgttctccttgcctggtttagactggaagaccccagctgtagggaagatgctttcctcaaaccatgggcaggcagagctttcctgccagcgagcaagttggcatgctggtgtttgagtggcagtccattagttggcatcaccacctagtgcaatctctaaaaaatagcaatctttgtccttgaaaatgaaaatactttggttttaaaaatatgtttctgtttttaatgaatccaagacttgagttaatttaaaggcactcacatttccctttgctgatggcgacacctaaaacgttcatgcccatgcacaaaagggtattccatttggagttctcttacattgactcaattccctatttgtaatacacaacatggccaccattgggcaacaaaataactttattaaagcaaagaaaaactgtgggttactgtgttacatgctctttcagaattgtaaagtttccctgaagtagatatatcacagtaatccatggcctctttgtggcctacggtctgccaaaattactgaagatgtcccagcatcacagcacggacctgtggagaggaactttatagcattctggcccaatctctgctttttgtagagggttctgaggagtttcggtgaactgagcttactaaccaggggtcacagagctaattgatgggagtccaggcttgattccattcttctaacatccagtccagtgttgcccaaaatgtgatctactgacaacttacgtcatgattggcagggttactcagcaaaaatgattcctggcccccagcagaatcaaaattattgagggttcagtccagggatttgcgtttcaataagttcctcagtggttcttatggacactaaaatttgggctttttaccaataagccttaagaccccatttccagggaaagctatgtgctaaatagttcttccagaatgcttgcccaagagaatgacttgccttcatatttgctctgctgtgtatattgacagtataaaccatttcaagatgagctttaaggatgagtaaaaacatacgctaaattaggagctgaaatctttaatttagagatactttttccatagtctgagagtaggaaaattttcatctgaaggttgtttattcagtggatgaatcaaaaattgttgataaagtctaaaaaaggtaaatatgattctttaaaattttgaattgagtgtaatggagcttgaattgatatttagtatgttctatttacttgtgttttcataaaaaccttgctggatgaatattcagggtgccaataaatttgttacctgtttggccataggaactgggcagagggaagttatgggaagacttttcagtgaatattttctatgcttcttgatttttgaaccctttgaatatattgcctattcacaaatttttaaataatataaatgtttaaagcattaacattcattgtagggccttagtaggtgattgctctgactctgcccaggctacaaaaacacatactctagaatctaggtgtccctgtagcagaaggtaatgaacatttccaaagggcagagccaggaagggaaagactgcacattcagctagttttaaggaaatcactaattggcttgaaaagacaagtcattttgttttagcacttatactcattattttaaagcccctccctgacagaccactcatcactggggttttgggtgaccttgggcaaatcactcaaccctcttgagactttgttttctagtctgtaataatactgatgaaaactccctgtatttcagttggctgacgatttctgaatacattacttagttttcacaacaactctgggggttgggtagtatggcatgatccctattgttcagatgaggaaattatgacccagagaggttatatggtttagagagggtcacacaggggtgggacatctaacttccagtactgggctctttccactgtggcatgcaggggacgtggattaggcaatttccagggcctcttctggcatccaagtccttgagtatatgagctatttggggctccgtcaacatttgttgaagtcttttggaaaaatccaaaggaaattgaagccatgggtttgcaattttagaagctcgcattgtaattagagtatcaaaatgtgctcatacgaagacaaccgaggaatacttacaaagccaacacataccaagttatgcaaattacaaatataccagatctcatatcacatagcacaaactctgcacctaactaccaaggggatggggaatcccaaacctcagagaataacatttgactctctcatcctctcctaaatgatactagcaactgctctttgagcacccagtaaggcaagcatttgttacgtattatcacatttaatccttaccacatcctctgaggcaggtattattatcccaattttataggataaggaaacaagacttagagattaagtgatttgaataaggcttgtaggtggtaaagcccatcaccaaccagggtccttattattattgttatttttattgctatctcctacaggaaagttaggatcctttattgatttaaggtgtgtgcgctttgtctcatgcctggctcgtcttcttgtctaagagtacacgtagcgtggtttcagataagggtatgttgaagagaaaacttaacgtacctctgccaatacccagggtgagcctgatttcatgcagtagcaatttgagtcgcctttagtgggcccatgagtaaaggaggcccatgaattctgccttcttgcctcaaaactctttattatgtgagcctggcttctcctgtgtagcatctgttacttcgttttgccttccacatgtactaagtagaaatagacaaacttaactcttgcagataatagatgactgaaaacagatgatgggcacacaaaacaggctttgtctccataggattttgttggtaaaatacttcgtctttcacttcaatatattttgttcattgttttgctgctgcttagatatgaaaactttcctctatcgtcctaatcttctgatatgccatcatctctttcaacctcttttccgatgccagagtgaatccagtctgcccttgaatactgtagaaacctcttggcagttgttaacaagccttagcatttactcagtcattctgggaagagaggggaatttacactgtttccttagttcacatagacacaggcgaggtaagtagcctggctgggttggcagaggttcttgaggattgtaaaaactgtgctttgctccggaccctggctcctcacagaggtctgcctgcttgtccttggtctgtgtcctccgcaggccttttacttgagtcagactcctctaatgagagagttcttgggtttcagtctgggggaatccagcctccacccgccagacttcctggagagctctctgctgatgctgaaagtgcctggagccttgaggattggatcaagctccctttcgaaggggtctcaaaattctttagacataatatatttgtggctacaatttgttaagaaaggaaacaggctgtactagccaataaattgtcaaaggagcacatacctaagatagagagaatggtttgcagcacacaacgctctcactcccttttctagtgctctgtattcagtatttacactaacttttagtagcagctgatttctaagaagacttctggcttctgctctttgcattgaccaaaactcttggggcatgtgttgagtgagggaatacctttttattcacctgcttcctagtctgaactttcagataatcggcacttcttgttcccagtgtgaatccaaagagctgaaacagctttctttgtgggaaatcaggtaagtgggatttctctacagggatgcagatgcagatctgaatgcatgtacagtgctccatagctcactgactaagctttaaccagcaagtcagagctatacagcacctataggtactcccacgatacttcaaaaattttcatggaattataaacattgattgtcagaaaaacagacctagttatctcattttgcaggctttgcgtctttgaacacatttgatatccattcctactaaattttctctctgaatctgatctgtctgctattcatatatttctgttgttttattagtatgtgctgtagccagatattttgctaatttgtgtgctttttctttgctttttcataattctgcctaacttcttaggtatagaatttccaaagctagttgttagtgtgccaaaacagccaaaacagctttaacaaaaaaaactatgctttgcttgactgggctgtaagatgacttagataatttatgcttcccttcaccatacttgggggagtacctgtttagaaagggttttatatcctggcttggaataggtctaataatttaaaccctctctcctggaattaccaaggtctaaaactaaaccttatgctaataatgttgaagttgaaatggttttcaaaatgatacccaagtgtttataattttttatgtgctgaactgttttgtttagataaactggaagaagatattctgggataggaaatggctgaaggaaacaaaggtgtgtgcagagaaatacatgaaatgtgttgtaggatcaaagatttaacagtttatatggaacaaggagacctcaaatagggagaggggaaatggagttggatggtaacttggcctggctgagaggacttggagtgctgattattatttatgcctagcttgtttaagagtttttaaaaaataggaaaccacatgtgaatgggagtgggggaaccactctaacttttaacttagccacataggagaagcctacttattcagacctcaagccttagtcctggcaaattcatctcctggtgatggcttaattatatttcaggcatagtattcaaggtgagtgttaagtttttatttttaagtgagaatcttgcaaatgcaagcatatcaactgatagccagtgtcttagggcccctgcacaaacagctaagtatgctcagagagccctactgtggaaaagatgccctagaggaacacccagtcatcctttcctttaaccttcatctcatcgttttctcttcccttccccaacctggacctatcttgcccagccttctcaatgaatacttggcatgaacttcattcactcaactttgtcgctgacacgcccgttgtactgacagaatcctggcttgaatggcgcttgctcagctgtgctttagacagacccttctggctgacctggtttaaacctggctttcttgacgccatcctcagcgtgttccaaggtgaaaaaggactctgctgccccttctgttgctcctctgcaggggaaaccagttgccacttggcaccaggatgtatcaggccggcatccagagtagtaacatgatttagtgaaaatagtactagaccaggaggaaacttgagtcctagtgctggtttgcttttcagtggctgtgtgaccttgggcaaatcattgcaccaccccaatctcagtttttttcatctatgaagtgacgagctgttctctaaaaacctttctgatcctcaaagtcaggaattcacataggttaccaaattcttgaatgaatagagatttgggttctaagtgcttttcttttcatctactgcactgcctttttacacaaaacaggggccatctctatattgttttgtagtgtgcactcaactcccctctcaatcttgggttcaggtaccaaaaagaccttccttcacctgcacagttcactacaaagaagggcattcgaaaagtctgtaagtgggccaggtgattcaggatgtttcgcgttactttaagaagctttttcttgaattaaatcactctatttttagcaactcactgggtgatgcttttaaaaatatcactgataaaaaatatgtgcttgagacaattacaggtatttcacatataatatttcacccaaatcttaacaaccttaaattctctccgcttgacacgtgaggggattgaggcttactgagattaaacaatgacacagggctaagaatgggcagggttggaatttaggtcagaactttctgtgtccacagcctgaattcaactctggcactatgttcactatgaggagtagctgccattgctgtaagaatacctggcgttttgtgcaggagatctcagggaaccctttttgttaggtttcaaagaaaatgatttctaactgcatttcagatgcctggaatttatgctgtgccaagcacttttccacttaattctaaatccgtgggtatttcaaggggaatttaacccatgtggttctgattcacttgtacttaactcatcaaaaaggattgttttgtaaaccttagcctcttcttatgaatgctttcgagctcatatttggctggcattggctggatttcgaatctgccatggttgaagcttggttcttaaatccttctttccaacaactattttgtggtagtttcatcctgggagtggatggaaattgaaggtgagtcatgaaggctcttccaaaactttaccaggattccagtggtatagacagtcactaacctttgaggttcgtgaggtttgttgcactcacctacagccttaccccattaagtagttgaattgtgcatggatgtgatctatgagggtaaaaaattaaaatcatagatgttgcattttcccctgggatggtgtagagaaaaattgtctttgagataaaaggtatttgtggaggttaggtatattactactttggaaaggccttttagcatagagtcttctatttgggagacattagagttatagagctagtggaaagtttctttcagaaacccccattagaaatgtagaaggcaaaagcctatttattatctttgcatttagatgagttgggtacattcagttctgataacctgctgagttggagaattaattaacttgtctaattaacttcacatgagctcatctaaggaatgtgtgtagttgtgtggcccaggggaagcaagagcaatttttatacctagttaacagtttggtttaagaaagatatattgagtgtcttctattccaggaagttggggatagaagataagagttcagagataaacaagactctctcctcctaaggaacctaccatttggtaggttataacctatatgcttctctttggaccatggccaaatggtatgactggcaaatagtcaatgtacagcaatacaccataggagctcagaagatgaagatgttcattttgatatatgaagctggacaggcttttcccaaaatgcagtgtttaagtttggtcttgaaggataagaaggcttttaaaggcagggtcaagggcgagacaaccagacatgttcttgggtaatacagacaatgccaaatagtctccacagatttctgctctgtttatagacgtggagtggggtgactctgcggaggtgaatcagagcgttagaagctcatgctgggcgaaagggggttgtgcacagtcctcgataatgagcagctgggattaacatgacagtttttaaccgagcacagattttcagggctgggacagtttagccttggatcaagaagaaaacacaggaaagggacaaggaagggaacaagatgtgaaggaacagtatgtgagatttacacatcatcactgcatgccatgtttaaatagaacatactgcataacatcttaacatgcccttacatttctatagtgtacaaataatggcttattctgtctcacgttgaagaaaccaattaaatgatgcatgttgggtataaaggttttttctattgaaaatatcattgtcatagaatagaaagagttacaatcagacagaaaattaaatatcttaaatatttctcttgtatagtgtttacaaacaccctattatcatccctatttataattaagaaaactgtggatcagaaagtaaataatttgcccatggtcacataggtatataagacacttccatttcagtttgcagatataatgtgtatgtgtgtatgtagcttaccttttctatttgtcatactttttcaattcactatatgacacatttacagagtatatgtcatgtatgtgttagttacaaacctattttaaaaatgaatactgcccaacctaagcagtaaaatatgactgatacccatttaggattccccgtaccatctctttcctgcttctccacagggaggtaacctctatcatagattttattacatatatttttttagctgacaccaacattgcttctgtgttaccatggtttacagtgaatatatttacaaaaacaaaattgggataattttcatttcttgcaaacaacactccaacactgcactgaaggctttgttagctcaagatttaggagtatgagaacaaggtcctgaaactgatttgaacgttgcttcaatctcgactgctgtgatttaatcctggggagcaagagggcaaaaatgaggccaaaggggaggcatgaagtaaccaacagggcctgatctgggatttgaaagatgtagattgtcgttccatctgccactaatttgttctgtgacattgagaaaataactttgccgctctgtgttttgatttacccttgtgtacattgtaccgtcattttgaggaaggcaaagtagtggggaaagcacagcttttagaatcagaaacaccaaaagctgaattctcattctgccacttactgtttgtagaaccttgggcaaatttcttaactttactttgagcctcagtttccttctttataaaatgaagcaaaagtcttcctcagagaattgttgtgagaattaagtgagacagcatgtctcccttgtagccagcaccatgctccataaatgctcattttctttttcttcttctataagtttccttccaattctaaaataggagattccagtgctcatcttatacataaacgactgaagcacaaccagctcataattatggaatttcctgtattaaagggctcaacatttctctcaaatcagacttgtcattagaagactttccaaggtctggatgaatcttttgaaattaacaataacatctggaaaaaaaaaatggctcatctcacactcacagagtagagagaaaggagtgagaagtattatataagttcatttactacccttgattctcccgttccctgagccaaaacaatagactataaagctgcgacttcatttttattgtttcataagccatctgcatttgcataaagtgtcagtaccgttaccctatttaaaggttgaatgtcactgtgaatgcaatacttaccttttactgtctcccgggaacctacctaggcatttacatagttctttgctttcttttcaatccattcttattgacgtattgtttgaaattggccactgtttgggaataactccaaaattccattatttccatgtgtccactctgtttatatttttatgattgttatggtaagcaatcaaatatgtaacatttgggaactgaggggaggggatggtggtctttactttcaattgacggtagtatatagggcatatcacattcaaaatatctcaattatttaaaaaatagaatagagaaagagggtcatctaacagagatattagtgagcttatttaaaaaatagaacgtatcttacaagtgagaactggcagtaatcttatgatggtaatgatgcatatgaccatttatttgatttaattggaaaaatatgtgtacatcagagaacagtggattaacggagatgatcagagttgagtcatgtctcaacattagatatcttactaggtttcgaggaagaaaaattaagttgatttggggaatatgagcttaggaaggaatatctggaattctcatttgcatttgggtaaaatttggttatgcacttgacctactttgctcaatctctttgctcttaatttttaaaatacaagctacataaaaattccagaaatgtagtatcttatgcttggattattcactcatatatatgtcaaatgacaacataatttgtggacttggtgtctcagttagaaatgagtttggatgcaaatgatgcaaaacccaaccacagtgacttaaacaaataggggttaatttttcttatgtcaggaatgaatttggaggtatatggtagctggtggtgattccactgctcaaaaatgtcatcaggccagccagtggctcacgcctgtaatccctgcactttgggaggctgaggtgggaggatcgcttgagcccaggacttcaagaccagcctgggcaacatagggagaccccatctctacaaaaaataaaaaaataggcaggcatggtgacatgtgcctgtagtctcagctatttgggaggctgaggtgggaggattgcttgagcccaggaggttgaggatatagtgagctgtgatcccaccactgaactctagctagggcgacacaatgagattctgtctcaaaaaaaaaaaaaagaaaaaaaaagtcattgaaactgaggttcttctttctttgtgctttataaaaccacaatgagataccatctaacacctattaaagctgctattaaaaagtcaaaaaataacagatgctgcagaggttgtggagaaaaaggaacacttatacactgttgttggaagtgtaattagttcaaccattgtggaagacagtgtggtgattcctcaaagacctaattacagaaataccatttgacccagcaataccactaccgggtatatacccaaaggaacataaatcattatattataaagacacatgcatgtgtatgctcattgcagcactattcacaatagcaaagaaatgaaatccacctaactgtccatcaatgagaccggaaaaagaaaatgtggtacatatacaccatggaatactatacagccataaaagggaactttgcaaggacatggatagagctagaggccactatacttagcaaactaacacagcaacagaaaccaaatactacatattcttacttataagtgggaactaaatgatgagaacagatggacgcatagaggagaatagcacacactgggccttttggagggcggagggtgggagaagggagaggattagggaaaacaactaatgggaactaggcttaatacttgggtgatgaaataatctgcacaacgaacccccttgacacaagtttacctatgtaacaaacctgcgcttgtacccctgaacttaaactaaaagttaaaaaaaaaaaaaaaagaacaaggtcttcatgaatccaggcttggacttgatctgcatgtcacctttatctttgctctatattgcaaattcaactgttgtttttaacaaaaggccaggcaagggagtagagataacttagaacaaatctcttagctcttcagaatggattaaaaggtgtgtcttgcagattgtgggtcattgacgtcatttgtttctaagaatagcgggatgtattggttatgtgtacccatggtatgtgtgggaggagaggaaaaatagaaggaccagggactatggtaggtattttgtatacttatttactactcatacaaccccaggaagcagagaaaactgactcaaagggtaactttattcactgccacattgataatcagcattccagaattcaaatcaagcatgatagattcacggaattataagtagttaattacatcttgagcaaagggaatgaatagttcaaaagattaaggatttagactaacttaaagatatgtcattttgcatcctccattcattcattcattcattcattcattcataaatacttgagtgcttattatgggcccatggggatattctaggccatggagatgcaaagtttaaagagacaaaatatgtatccttaaggctcacaatctgatgaaagacaatcatataagtgagagtttaccatggagtttggttagtgccacagaggagggaaggagtaagtcgtcaggggagacttccaagtggaggaatttggtggaaaaatagggagaggaaaggcattccaggtagaggagatggcatttgcaaagacgtgtggaagagaaacagcaccgtgagttgaggaactgcagttcactcagtgtcaatggagggggaaggcatttagggaagaggccagagaggaagccaagtagggagcatttcacagagcgttttagggtctaactgaagttaggttcactccagcagggcaaagggaaatgagggtctacactaaagcagtagcaattgaatttcagaggaggggcaataaagaagctgttgaggtggtaaatttgacaaagtttgcgggtgattaggtgggggtgtgagggatactctgtaatccccgctgccctgagtctgtggccctgtgatgtgggctgtggtgatgccctttcccaaaataagaagtgtgggaggagcaagtctaatggcaaaacaagcttctatcagacatctttctacacgctctgcccttcctgcactatggaaacaaccttctcttcctaacctagctgaagccatcctggctcaggccagctgaaaggccacgagggcgtctgaatggttcatgatttgaccacttgaatgccatcagagagtgatgtgtctaactcgagacgaacagcaaattagttgctgagctgagactggcgtgcaggcctcctcacttttaggcttattgtctttaggttctagccctgcactgtgttctgcctaaatgggcaaggtaacattatccacaaatgcctgctgccgtttggggaaaactaaccaggacggtatgtgttactaaaagttagctatcaatttatagagggcagtgatgactttcatgcaggtttatgtttctatgtggctccctttggaattacaagtaaaggaaggggagaactggagtcgtttttttgtctgtgcttgtgtcactaactaggagagtttttttttttcttttctttgagaatgaacatataaaactctagtaaatcagagtaagttatctaagtaatgccaaattcttattagttacttctttttaaatagtgcaggggattattaccttttctgagccatggacacttttaagaatttgatgaaagaacacgttcttcttccaaaaaggaataaatgaaggcactgtattgagtccaagtgcattggttgcaagtaatggaactagcttaagcagaagaggggatttactgtaaggaaatcccaggttataagaaacccaagggcaggtactatagcagggctttacccagggctggaagcaaaaaccaaatgctctctccaactctttctggagccagctggtctctatccctgccccatgcaggtggactgctctgtgcatcatgtacatgccgcctccctgctcccaaggtaagtcacctgaggtctagccagctgcagaggtgaacaccagtgctcgtcaatcccaattccagatttctggaagagaatatgtgattgctcacttaattgtgttcagattcatcgaacttgcagatgtgatttatgtatagtttcagggcacctttagacctaccaagtcccaattgtggtcttcaagttaagaacccataactagagaaatctgaatgcccatagaccagcagcactaacttttagccgtacaactactgcagaaatttgaaaatacatttgaatagaaagcatttgcatgagcatagttcctaagaacacttgctttgtgcaggagttgtgaattttaaatattagtagtgaaatcccaggatggcgaatatgatgtattttaaattataacactttccaaggtcattgatattctattcctaacttttacccttaaaggtttggaaaattccattttaattattgttaacatgcttcataaatatccaagggaataaaacatagacctgttaatacatccagagagctaaaatctggctcaagttgttttttcttccacagttggagaaaattgtggtgtttggcttccctcttggggcattttaaaccacttttaatgctgtctcttattattttctaaccatatacactttccgaacgtatctaactagctgccttagatgaaaccccagtgtctggccaagctgatgtaaatctctagtaagtggtaagagggaacagagtaacacagtgccctgtcagtgttcagacagtacatgatttagtagttgtaggacttatagtctcaggagcaactttaaatcttttttctagttctatagaatggaagtttctaaggcatatactattctgccactggctccactgggcaacacttagctagaactagagtggcctatctgcccatgggatagtattaagatttaactcttcacatcatgtgtacctggggtgtctgggaaataactattaattccaaagagcaggatgaatatttgcataattgctagtctgtgccataaaacagttgtcactcaccagtggcccagaatatcgaaatctgtatgtttccagtggagctgccaagagaccccatgtgattgtcccattagtgatgtgttctcactccacttagcaggtctgaaaaatggacgaccataaaataacagtgaaaactcagttctagggtctgctgccttagttgttggtgtctaagaatatggatcatctgttgtatttgatatctgagcacgtactgatttttgtcaggaatcttctcttgttgatgaattaaatctacataatcgggttttggtgctgctgcctctcccaccccctcagctcccatgcctgtcttttgcacggttcactcacgtgttctgagtaatgcttgtactttcttccaacttgtctttcttcagctgagttcagtgccagactctgagctggaaacagtctcaggaatttttcattcatcagacattttcttccaaagaaaagttctgagaagaggagggccaccttgatagtatgttagcatgcttctgtgactgtgtgtgtgtgtgtgtgtgtgtgtgtgtgtgtgtgtgtgtgtgtgtgtgtgtgaaagagagaagatatacaaacaacctatataccacatatctattagcacatggatatttgataaaaagccaattctagaaataacatttgccaaccaatgtatcaaaaccatctccctgccgtttatctgtcttgatattacagaaagttcatatttatagaaggcatttctcagctgtggttaataatggctgaacttttgtccctgctttaagttttccaccagatctctcagaattgatgctatcatggaatgtgaatgtggtgtgtctccatttcctgtagaatgaactcagggctggcagctaaagctagtggtcttggattcccatgccctgtcatttacgaaaggggcagtggagttcctctggaggaaatcccacccaccacgccaggattccatcacatattgttggtctgggccgtgggtacttcatacttggttttctgtgaaaattcaccaagtgtgtttgaagtaagaatctcaaccctaatgtttatacataaatgtctgaatatgataggagtaaatgcttgctcacaaaaaggaagggaaggaaaagaaatttataaaaaagcaaaaacacacaagtcagggtataattacattatacacaggttttgtttttgttcattttgatagcattaagatttacagataatatgattttatttagggacagcctcactaattcaagttacctgttctacaccaggtaccttattgtgagaatgggaagaacttgttaacggattattagtatttacagcctaatcttccctagtttccccgtttcagcaaatgaccatttattcagtgatggaagccagaagcccgggagccttccggtttccctcacgcttcccatctgatccatccacacgtgctgttggttctttggcccaaggacgtcccctacctgctggccttccaccctttctatgccaccactctcgccaactttcacctcaaatccttcagtagcctccctgaaaccctttccatttcaactcctgagcccttaaaggagcacacttctcaaataacagtggcttttattttcagtggctttttattgagctttgagccagatccagactcctcatcatatcccgagatgtcctgcataatccagcccctgccaaaggatccaacctcatggcatgccccttcccctttgcactcaaagctctggtcacagcggctttcttttaatcctagagaagccaggctatctgccagcccagagccactgttcttgctgtctcccatacttagaaagcgcttagatgttgcacagctggcttgtgctcatcctttaggcctcagtttaaatgtcacctcctcaaagaagtcttttctgataacttttaccaaggcaggtgtacccaattattctctatgacagcagcatgcttgtttcatttgtaactaaattacaacctcaaatctaaaactattttaatgtgttgatctatttattcactacctcctccacaagattgcaaactccatgtgaacagaggttttatgttgtgctattcactgatacagggttgtggctcaataagtatttgtcgaatgcattaaggaaacccatgattctgttttacagttgtaaaatgtaggcctttacaactgtaaagcattgaagtcaaagtgtttaatttaattttaggttgtggaatttctttctttctttctttcttttttgatacagggtgtcactctgttgcccaggcttgagagcagtggtgtgatcgcggctcactacggcaagcgatcctcacacctcagcctcttgagtagctgggagtacaggcgcctaccatcacacccagctacatttttgtgtattttttgtaaagatggggttttgctgtgttgcctaagctggtcttgaactcctgggctgaagcgatccacctgcctcgtcctcccaaagtgctgggggtataggcatgagccactgtgccagctagaattttctttttattgtgttaaagtatacataagataaaatttaccattttaaccacttctttgtgtacagtttggtggcattaagtacattcacattgttgtgcaccttgtcacccccatccatctccagaaccttttcatgttcccaaactaaaactctccattcctccctcccctaaatccctggcaaccatcattgcactgctgtctatgaatttgactgctctgggtacctcatattagtgcactgcaatcgattgatattttatatcaatttatttttattgcctctttaccaacatatgccttcaccctccacgtacacaatattcagtgttaaaattggcttgctactgaaaatctcatttctaataattatttaatgataaaacattctattaggattcttcatgaacttaattcatcttttgtggaacttatttttggaaaataaacaatattacaaggtacttttatgatatacaggttaatttaagaatatgttgcccctgacaatttttatatttaatcataagaccctttcctcttgggctactaatcttgtttttggattggagagaatattttatgcttcatggctttgaaaaaatataaaagaacaaataaattgttatacaatattattgtttttgtcttgctgtttaatagctgatgctctgtggtcaaacttcagtgtttggtttaacgtggcatttcatacaagctgttttaaaagggaatgaatcagagccaactggttctttaaagtggaatttgcagaccattaagaatgaaagtattctgtatgattttattatcttgatggtaaatatgtcacccaaactatgatttgactttaccgattctcccagtctttttttttctagtaaaagtagagataactttacaggaagatgaaagtcagtaatgacttgtaggatttatagtgaaggaacaaataatatcaggtaaatgattatttcaaaatgagatattcttttactctgaacaagatttctaactgttttcttcatcatggaacagaataaaatgtggtaacaatttgctgcagttgaattgctgccacacataattgggtcccacagaactatggcctggattttggtgaattgcttagtctgcatgttagattaaaaggtgtacaacaaatcaccttgtttctgcagttttgaatgacatttacatttaagtcatagtggtaatacttttcatttatggaataaagaaaataaaatcagggaaaatactaatgtagaaatggttttgtttttttcctatatggtttatttctaaagtgctttttaaaaacatttagttacaattaagccatacctcagaagcagtttgttaaaggtaaacattttgcataatacagtttggtaaattttgccaaaaggttgtattcttttaataacactgtatagaccatgttaaataggtaatcttgtgtgcagtattttatataaatgcatggattggaaagtatattcaaaccttattgtgtcattttaaaaatgccatgtagcttaaataagatgggagaagcaacattgcatagtaaaagtaggcctgaaaggaatttctttcccctgaaattttattataaaaaatttcaaacttaaagttgaaggaataatataaagtatacacatatactttccacttatattgaataattgttcccacttttatacacataatagctctctatgtgtatgtacacatatgtatgtatatatgtgtatatagaatatgtaaaatatatattaaaatatgtatttattatttatttacattgctgaattatttgaaagttaagttgcatacatcatgagacgtcacctctaagcactaaggacattcttgtatgtaaccacaataccgttatcacacctagaaaaacaacaattctgcagtgtcatgtagtatgtagtccacataagatttctgaaattgtctcttttagaaacagtatccagttgagttttgattattatgatttttaatctaaaataatctctgtacttcttttggtgaagagaaagtaatttgcttttggaaaagttctagacaattgccttagaaaatatcacatgttctgagttttctggttgtttccttgtggtgtaatttaccttgttcctctatccctatattccctttcagctagaagtttggtgtggaagtttgattagattaagccttgacactttttgacaagaaacttcatagataatgtgcactactttatattttataaaatcaggagtcccggaagaatttcagacgatctccgtgatagtgcaattctggaatgaatcaagagttgacttttggtgttactgatgctaaataggccttgtatttgggccccaattggagaatgcccctggaattccactcagatacaagctgcagcagtgggtaggggttggatgtgagagttcctgacagcggcatgagatcatgtatatcagtgtgctttgtaaaactagaaggaaagagactggaaatgggaattctactaactattaggacactgcagtagtggatgatcaaccttcctaaattttgactttgttgtttgctttgatgagctggtagttagtataattaactataatataattagtaaagaacataataaagtgcctcataatcagtgcagcactgtggaaatgaatagtattttgccatgattaggatgtcagtcctagttgagaaatactgggttatgtcgagtggcagtgatgccagtttatgggctggcttatgttcctaaagttagactttcagataagtagttgttatcttgcagagatctccaattaatcatggcacacgagtactcttcattaaaggaaaagagaaagaaggaaaaaaaatacacacacacacacacacacacacacacacacacacacacacacacacatcttagagtcctagagggcagaaataatcttggggagcttttgcaagacgtatatgcctgggccccatgccacatctactgaatcgggttccatggggaaaactgggggaggacagggtgggacccaggcatcagcattttacaaaagctcccccaagtgattctattatgtcctaaggttaagaatgattgcagtaagaagaagtaacagcagttaggaggctgattatgataatggaacttcttaactttaattttccttagactaaaagttctctgaactccttcctcagaaagttgtattgaaattccacacattaggagcctaatgttccccaggccaacctacctgggagaaataagtgtgctgtgaccctctatgtcatggataaattgatatctcattcttttgtttgtcatttttatgaaaagaaggatttaaaataattggagcctagtgcccaaaattatatccttgtgccttccctgcagtttgtggtttagtgactgggcaggagggacgagaattcattgtaccacagaatattctttccctgtaaacgatgcatttgcttcggggtgaagtctgattacaaatgaaagtgaaataatgctgtagaccacagcattctgagctgcagagctgggcatgagctgaggatcagaggctgcagacacatgttggtcagagcccaagccttgaggccaaatctaacgggactggagagcaatccttgagctaaccactcagaatgggaacatggagatgcagaatttcccatgaaccagccacactggagtaagccagttaaaaacaattagagtcgcactttaattttggaaagacttggcctgttgccctagttcatgaaggtcttataaggaagtgattgtagagcaatttgcaaatagaaagcatttctaatactatattttagttgcattaggaataatgatttacactgaagccaggaatgagtcagacgttacacaagctttgagttaagcacactccctgtctaatgctgagactatctgaaaaaaaaaaaaaaaagagtatgtaaatttagcttaatatcatgtaagtgctatgggaataattgtaaataattggattattagtaaggaattgggagtgtgggcagatttctttctgcggttggagtattggactaaaaacagcataaccttggcaatctaaatgaagtacaggacgaaaagcacatgccgccaaatcggaatgacatttgaaaaccatgttaatacagcatttaccttccaagacatttttagatccaattttatttcatccagattatgcctctccctctacaatcagcaatttttgtttaaaatatggatctacaaatacatttatatccacttgctaatctgtactgtcaaataagccagtttgaatttgtttccaaaataactttgtctatagtgataaatatctagcacagaaatgtactaagtccatagtttctattctacataaagtattcgccaaatatatagtatacttaataaattggatccctgtggactgttgggatgcctaatatagattgtcagaattaacaactaccatctcgattctatgtatttcatattgaaataagaataatacgttattgaccctggaaaagtcttaaggggtttttttttttaatgaagatcttccaatgagaaattcacatgtgaagttatgaatcagtggcagacagaactgaatcagatttgtattagcattttgtagagtgtctggattttgctggtgtcactcacaaaacaccatatttgtatctatcctgaaccttggcaatcctcatatataagataattccatagagtatcttggcaagaggaggtggaaaaacaaatcccaacagtgttgaagagaggattataaattaaaattcatgttgcgttatgctttttaaaaaggattgaatatggcaagctaacctgaatctgtttgattaaagcatttgcacttgtctcagtaaattaacagaaagaaacaagcctaaattctctttcttgttacctaacatggagagttttatttattttttaaataaaagattacactgctgtgatctttctagtctcagatgtaggatatatatagtcataaaaatcttgatgactgtttttatcctgaaaaggattcattgtaatgtacactgaatgctatgtgtaataatgaagaattagaggcaatttaaatgatagacagtaagaaaattactgaacacattctgttataacttgatggaaaattatgcagcaattaaaatcatattgtagaatagcatttattacatgggaaaaagctttggcaatgttaagtgaagaaaatccagcaggattcaaaagtatatttttagtataatccttattttatgattaaaaaaataaaacacacacatgcatacacacaaaatcttacgtacgataatataatcaatacgttatcaagggtttctttaggtgtaattacatttgtttatatgctactgccttttctcaattgtctaaagtaattacttaattttgaattaaaatacataataaaatattgaaatagaaaggaaagaccaaacagcaaagatgtatttattaaatccctataggtatttgtttgggagaattgagccaaaaaaataaagatgactttggtatttcactttgtccacatagttcctgcattttaaagagattttgttccaaattactgcagtgctgagtgactttttcttcatcgaaagaacgaaatgagggctgagatttattcaacagctcagtatttaatacttgtttatatttttgtttgaattcagtatctgtggaagaagatagcaggttttgaataaatctggcatacaatgtaaaatattaaactatacctacagcttgactatataaaactaaaaaaacagtagagtaagaaatgcataaacaaagtaaaaaaaaaaagacaaatgataaacagagaaagtgtcaggagacagggctggaaaggtgggtggggctatatcatgcagagaagagggacacagaggtcttaggcttgtcttttggcatggtgagtctggttgcatgtagatatcactcacacaatttttgacctgtttgcatatcacctgtactagtatttaatatttttaaaaaattgaattaaaaggtttttcaattcatcatcctcatagcagacataactgtgaaatcatgagtctgatatatttatgctgtttcataatacacattaaaattaatatgtgactactaaaatctaaaattatcttgcatcctgtgagtgggacataacactggcatggagggagggagctggggaactggggactcggcatttggaccatcctgtctgtctctccagtgctgccatagcttggatatggtagtcttctttacatatatgactggcatggagttttgtttttggaattcttcagaaggttgatcttacagcatgggcatcagagcagtgctgtttctgcaacaccattgaacagaggtggttcattgcagatagcagaggagagggaggaagagcacgtagtgatggggagcagatggagttgaaattccaagggaggggttggagtggagatgcaagaaaaagaaagcaagagagaacacacaggatagagggatgccagcagataagattcagctattgccaaaacattgttacgatccagaatgttgactcttgctggtactgtaatgaaaagttgtccttttttccttagtaaatagcatgtctgcgatgtcctatgagctacttaaagaaagaagaaaataatgaaagcatcccagtagtttcattagcacagccagtgattttcataaaactgttgcgttcacaggtgaaaggaacttactggggtcattgagtccatttttagactcacagggatcactgcacctaaacacttctgaaaatgacctggaagcatgcaaatgttggtttgtggatagaagcccatgagtcttaccccagcccagcctcccttgtctgtcaaggtcattgtagaaccacggaaatggatattatggccctgatttctctcacaaggggacaacctgggtttggtcctctgtgctcactacgtctttatctttcttatttgttgttggctctctctctgtaggaaaaaaaaaaaagaggcagatcttatagctggtggtagactgctctgattggaaattctcttgtggacttagcttatccctgttttgctttaagatggtccttttgcctaggggttacaatgatttcagaccagtgtcctcactctttatattaaaacctaatgtgttttgcatggacaaaattttaaattcttgtttgttggtttgcttgttttgtatttgaaataagatgaccccaactcaaaagaaacagataaccatttcttttattgaaggaactcccaggaagaaggtgccatgacttgcctcactgcaagcttcaaaattctttgctttctcagccctaaataacaatagactggaagctctgtgaggtcagggatttggcctcttttagtcactgaagcatctgtatcaggcataggagctgattcagtgtaggcactgatatattttcttaagtaatgagtggataataatattaccatgttacatttgtatagcaattcacagttgtaaagagttttccattagctcgcctgatcctcacaatgccgttttcaaagtgggtaacaactgatgttttcatccctattttgtaggttaggaaatcgggttcagaagtagaatggtctatccaaggccttacacagggacagtgatgcatgattctgtccctgaaattcatttctcaatttggagtcaagcaagatggagcacagctgttcctctgcatgatggttcctgcttttctggattttcatcagatttttattctttattttcagattacaggacaggcccatgttttactgtgatcagcaaccagatgtgccagggacaactcagcgggattgtctgcacaaaaacgctctgctgtgccacagtcggccgagcctggggccacccctgtgagatgtgtcctgcccagcctcacccctgccgccgtggcttcattccaaatatccgcacgggagcttgtcaaggtaaacccgggctgatggaattattaatggattaatcttatttgctctggagagccattctccaatgaagttgaagagaatggaaaagtagtgtcagctacataacttcacaatttcgctgactgcatgatatccaactaaggcattaggaacgtggctctcgagagagcagctgaagtcttactgaatgttttcttgccaaccattccccctttctgaccccagaggtgtttgtatgtacctctgactccaggggtggtgtgattctgtttacagcgatgcagtgcattatggcagtgctgtgtagaaacacaaagcaaggtttgtgaacaaggtagtttatgtttttcttaattttttttcttcatttgaaactgttgagttcctctctcatgggttgtgcttaattgacctgaagaaaattgtttctctcgacattttgcatgctacattttgcatttttttacaagtccaaaataaattaggatttgtttcacagttttaaatatccccagatgtcgcctgctagctgcttctcctgcctcccgtagaagcccttactctgtttttggcttttactcctgttcttccagctgtacaaattcttttattgtctggatgtctggcaggaaacaggaggaagtgaacagaggcagctccacactaaactgatgggattgaaaactctcagcctgtatctgtttcctttagacagcctcaggactttttatagcaagttgcaatattttcagaaacttcaggatatgcttttctgaggcaaatagataatactttggcgttgttttgtatgttaattctaagggtaatgtgcaataaaacagaacttgagcttagtcacacagttttgtgggtctccattacattccacttcaataaattccacttctgatattgtcattcctggccttcagctcccatgtacaacatacagctcctttggatgcccttaaatgtatccctctgaatgtcaggagaagaaataagtcaccttgaaactctaaaattatcaagggatggattgtagtattttacaaaagtttagttgttttttggtgccttcttatttttcccgtttttagaaaatcccagtgagttttgaagaatttgttcatcttgggattacaaagttagctaatacccatgaacttgttgacagtgaccagagagctagacttttaactgcctcagctgcccatcagtgacccattgtcagaggttagggtgctaatggaattgggggggtggggataatgaactgccttctctttagctttgctattcgtttcataaatctggatctttccagcatttgcttcctgtttctttctaactctgctattcaacatccaagaaaaaaaatgttttttataagaaaagttttgaaaacccattgaatcacaatggcagttatattgctattttgagagtgaaattcttcatgtttggttgttgttgttgttgttgttgttgttttttctaagagattctgccaccaggttgtggctcttgctccttgctggtgtttccagtccttgggtcagatgtgaggggctgtgggcaaatgggttcataaaggagcttattctgtcttcagacctggagtatacagccagtggagaattgccttgtctatattttctgttggccagaaatcatgatcaacaagacagctagttctgcctatatgtaaaaatcttgattttcaaaaacattttaaaaaatacattcaacacatcaagagaatggaaaattctggtctaagacaaaactgaaattggctagaaaacataatttaatgattttccacatataatcatgtatctgtgggttaagatatttcatttaaaacagtaagtgatacttttataataaactaaattgttgtttctttaatatcccttttactgcatgctgacttttctcaagaacacaggttgagatcttataaacagcaatcacttttttctttactcaatgaagagtgaaactaaagagcacattaagcttccaggtttcaaaaagaatacattagactgtttgcttggggattctttattaaatcagacttttctgttatgaacaaagagatggagagaatgtacatgtactttataatctttataacaaaagtagtgagcctgaaatgattaattttgctcctggaaggttaatatttgggcttacacataagaacccaagttagtccttaggtgctggttatacaacagtgaagaaaatggacaaagtccctgctttctggaagcttatattgaagacattttgaagacattcaatttattaaataaaacaaacaggcatgtattaggtcagtgggtggttagtcctgtggaaaaaaataaacagggaaggaaggatgattagagccagcagccaggtgttgctgttggactgtcaagggaagggctcgtggctaaagtggcattggagcacagacctggaggatgagacatcgtgggccatgcagctctctggaggaagactattccgggcagaggggcagccttacagagctctgtggcaggtgcatccttggcatatttgaggaatccagtgtggtgggagagataggagggtggaaaatgggtaaaagatcagagaagtcatgtcgaactccccaggacatagtacacacttgcacgttgagctggggaaagacatgatctcactgacatttacaaaagtggcttctggtggccactgtgccagcaaggtaagtctgcagctgaaactacacactcactcacctaacaatctctctcacttcttggcctaattttctgagttgtttaatttttactgtgcaaggcacttctccagaatgtgaagtgaacatttccacttcatttgcgcaaaaacattagctgtctcgtgtagtctgagtgaccttcaataaattccgttttaactaaatcactcagtacaactcttaaaggtagtttcattgtagaaatgtattgcattttgatttgcaagattttttgaataactctgattattactaccaatctggagataaaaatgaggccgtgaataatggccttttaaacgtatctttatactttgctgcatatgtgctaaaacccgcaaaagttaatgcactctcctctacattaggaaacatggaaggtgggaaaacaaaaaatacttgtgacttcttatggaacattattaatcaaacgatgtattttacataatgcaattgtgagaaacagtttctctaatcatattccaaatattgtgatggacaaataactcaccgatataaatatggtaacataattgtggacaaattatcacattttattctgcaatgaatttcatatgagttttttttttttctctctgtcttctgtaatctgacagatgtggatgaatgccaggccatccccgggctctgtcagggaggaaattgcattaatactgttgggtcttttgagtgcaaatgccctgctggacacaaacttaatgaagtgtcacaaaaatgtgaaggtaagaaatcttatgctttgcagttggggggtgtagtgggggcaggcaaaactcaacattagaaacaagcttgtttgcaaattattcctaaatccttctgtctttgtcatccctgtgaatgtgtaaatataatatttttaacagtaataatatgcctttgtgctattggaccagaaaaaccctgtagctttttccacttttatagacccaaaacaagaggtccatctgaatcaaattaaatattaaaaacatgaaatatttttgaaccaacatttggtttaaaatgttcaacacacatgtttttgcatagttctagagacatgaatttaaatttggtcattagatatcattcagaataatatatcttccgaagtttttctagttaaaaggtatgtttgattttgtgtgtggggaggcagattgatctattaacccttatatttatgctcctagtacatgctcatgattttcttttctgggggatggtaattgcctatcaaatgaaaagcttttaatgttagtcaaacagaaaagtaatttgagataatttttatatttacatttagtttatagattgaacttctacaaatatatatacagaggatgtgtttatagtcaccactactgctactgctctttgccgaaatgaggcctgacttccaattacagtcataatttcttcgtgagaggggagcatctagaaaatatgtaggcagcattggactctcttttctttgatgagtgcatgtaacttatatatagtaatgtccaacaatagtgtaacagcattctcagggctacatctctcatcaagatcagaagagaaaactttttccttcatcctcaactcaccccaccttgaggtttcacttagatggatgcatttttattgaaaacagatgctgttatatttatgcccctagactctaacagtgagtacattctaagttatttgtctgggctggataattaaccttgtcagttgccactgtatatcagatgagcaaaagacagctttaaatttaaggtgcaattcataagttacatgtaagacatttaatatctacttgccctgaaactgaataatctaactctgatagaactatctttatgagttggaattgtttttaggttataaatcatcattgaatttataattgatactgcattcttgaacatgttatacatagttattcggggtagttgtgaaaaaatagttctttctaaagacttcttaaaaaaacattttaagtttcaaagaacaataaagttgactcttgataggccaatgtattttagaagttgtactgtagatctaaatttgaagcagagaatgttggcactgaaaggggcaaagaactcagctatttccacactctacattatatattaaggaatggtgtcttgggtgtattaagtaccctgtctgaggccattcagacaagactgctcaaatttacctctttaactcacactctggtgcttgctgagccatattacattgtcctctttcctagatgaaagttattattctggaatagattttcgggccatatacacacacacacacacatacacatatatatatacacacacacacacatatacacacacacatatctttatatagacacacatatatctatatacacacacacatatatatatgacattaacttaacaagccattaaagtttatcacatgcaaaacctacatcaacgataggttgtgttttatcttttaggctttctcagtttaatatattcagcttcagaatatataatcagcttcaagattgaggggagtatagtccttatgacttgtccagtctgtgttttgttttctgaaattatgatggcttccagcctgagtagaattgattttgtctcttgcttttcattcagacaagtcaattaacaggaatggtctatggatgtggactagacagaagattctaatttaatgctcagactgaaagaaaaatcattcgaatctttttattgatgctaagaaacctattatggtggtgtatccagtggaccaaaaactcagtctattacttaatccttttccacacacaaaaattttccagctacatgtgaaagtcagcagcaagataaaaacagactattttggctagatttttttttcctttgccatctactattacattaatttagataatggttttttccttcttttccttctagtatcaatgcaaaattgatactagaggagaatgtcctgttagtgctatacattctctggcctggagactggtgtgaacagggttgacctgtcttactctggtaagaaagtaatcaggaagtaccctgagagctcttggcaagccgggttcactttttcgacgtccttgctcttttccggttacagtgtctcactgtggaaatggcataactctgggcatcggctggtgtctagatggccaatagagggaacccaggaagtctggcccgtaatcactgaatatgttccctagaaagatgatgagtataaccatggggttctgtgcccttgtgaaaatgtcctggtacctttgccattgctttgagtggctttttaaaggtagcttcctttagacttggaggggaaggaattgagtacttttcatagaattttttcaagaaaaaccaattccatcaaattggctttagcaaattcacaagatgctaaccctcacgctctcagatctgagaatgccattattcgagttgctttccatgagatcttcctcttgcagaattctcacttccttcctaaaatgtccctctttccaaaaactaaaaaaaaaagaaatgttacggaaaagtgttttataaatacatataattggaggacattttgaaatgtaaattaacaagttgaagggatttaaataacaattattaaattttcatacatttaagaaggaaaagattgagatttatagctgtgatttgagaaaaaaggaaagagttcatgcccaccttctttgttgatctttccaatgactgtagagtacgcatgctgaaagaacacatgaacatttttctttggaaaccaagtccatatttgcataggttactatgggaggaaattaagaaataaaaagcgtaattaagggattaagttttatttctggaagaagtccgttggattcctaattaaccactaatattttgggatttagattatcgccagcccagcctttagcaattataatagcactgcatgatgcacaggacctttttaaaagtgtagcttttaaatccatgcactccataatatgtgagccaaaaacctcaggacttcccctttccaaaataatagcatatttatctcatggctacttactgttaggggctcttatcctctcaggagctaaggagaattcccggggcggcttaacccactaccatagatggggctccatcctctttcagctgtttgcaggccctagactttcactgttcaaggtaactggctctctctatacaattagttgaaaaaaaaaaaaatctctgcggtgaaggtcaaagagccctggaaataaggcaggcctggctcccgtccttgatgccccgtggtcaagtccctaatgctttgtgtgatcttagataagtcaattaccatctctgagttacttcagctttcaaatgagggggttgaacaagatgctatgtgggggttctttccagttccagaattcagactccattttcaagttgtgatcgggcggcggatgcagcatgaataagaattcagactccattttcaagttgtgatcaggcggcggatgcagcatggataagaattcagactccattttcaagttgtgatcaggcggcggatgcagcatggataagaattcagactccattttcaagttgtgatgaggcggcggatgcagcatggataagaattcagactccattttcaagttgtgatgcggcggatgcagcatggataagaattcagactccattttcaagttgtgatcgggcggcggatgcagcatggataagaattcagactccattttcaagttgtgatcgggcggcggatgcagcatggataagaattcagactccattttcaagttgtgatcgggcggcggatgcagcatggataagaattcagactccattttcaagttgtgatcgggcggcggatgcagcatggataagaattcagactccattttcaagttgtgatcgggcggcggatgcagcatggataaaagctggcgtacgtgatgtgactataaaatagtatggctgacgtttttgtcaacatgaagagtcagcttgtttagtttttagtgatacattttacactgggttgagtttgtacaatcaaagttaagctcacaggctcagtggcattcatgatcattagtgtgtcacatgttacttttaaacagctgccacagtttttagtttttttctctcattgtattagtatctaggcagtcaggatcaggttaactgtcaggatcaggtttctcttgtcaagtccacaatcttggatggagcttctagatagccaagtaatagatggtgatgcctgtcccagaacagacaccaagctccatccatctgccctccacactctttcctcccattctgccagaggagccctaggatgaaggggcttaggcatgggaagaatgctctgggagaacagatgagactgaaggatgggaaggagcagaaacaaaggacaggtggcgaataaggaaggaagagatctgccatttgtgactcttcttaaggtcacagcaagaagccagtggggtcatggacagctaccatgggacagctactccccagcagctctgcctccttttctgcctcaaggaagcagggagaaatgtccagagcacggaaatagctcttcccagccaagcaccactccccagcaagcgtccccacctggtttgctttcatggctggcatttgacacagcctgatttatagaaactgagaaagtgaccgttctcaaattccctcttaacttgggatgcctcaaattcaattaaaaggagatgaacacagagtgggaagaacttggagaaataataaattcatatgaatgagtttcagagtgtgagtcaatcctattcaaacaccttattctggcctttgctgtcgggaactttccaccacagcctggtaatagatagaactcttgcttttatttgttacgaagccatgccactgagaaacaaggtggtttaggaaaggggaaaggcactagacacctgaaggcaaaagggtgtgtcactgagaaggggacatattaaggggaatttgaagtcgtttaagctctttcaaatgtaacaatttggcctagtcccattttatcttaatctatgtgaactcagggaggtgtgcactatgacatatttcctgacctgctggctttcaaaggcatgtacctaggtggaaactccccacacccaccctaaaaacccctgccagttggagacttgggtttagcctcactttataaatgatgggcctctttgctcttatttcaggtttgattcatgtcagttttctgaaggcctcagtgtaatgcaagaggcgtacctgggcaccagaggtatagaatcaggcccacagtcctacctgcattataaggattagatgattgggtacacataaagcattttgactatgtctagcactcagcacatgcaaactctcatcattattgttcttgttattgttatcttcaataaagggcccaaatctcactcagccagcatggaaaagatgtttcccccattctgccaatgttaattctattgtttaaacaaatttttctgacatgggctgtcatttaaaccttttagatattgatgtacgctaagtggccttaataagaatggtagctgtcatttatattaatgggttgagaaaaaatatttaataccacattgtctcctcatgcgatctttggcaggtgttgtaggactcagatactaacttttagggacactttgaaaaaggtacattcttcttaattacaattatagcttcctctatccttaaatgaagctttgaatcctgtaggctctttgacatacttgctttttgtttgtgttaagtagaagtgtggctgccttgagatattacgtgggtaaccctaggctctgtctgcccttggcagtttctctacctgaccctttcacagactctaatgaaatttctatctgtcagaatagaatatgcacctttaccgttacataattttgcaatgacagtgctgtttatgttagcattgactctaatataagcagtgaaatattgtttggtttagcctctagcctagcatggaagaatggtgattttggttttaaaaaggttaaactgcatgtaaacactgtcattgctgccttttttactaacaaggtgaacttgagtcagaagatacttgaatctggttcacttagaactctattttgtcttataaatgaagagagtacttagcctgtagaataaatgttcttattgggggttgtaagcctttcccagttttaacggtgtcagcctggccattgtaatactcccaggaggcctggctcaaatgtctcctttcccaaggtcagtgcagaaagctctgctggtctcagagaggaggccatgcagattccctgtgccctgagtttacttctagcctaagaaggaagctgtcatttttttctcttcttctgctggtgccgtatctgttgacatttgtcagtgtgtgggtcaggctattgaaaacctctccttgaaggaaatggccatatttgtcctaagggaattttactgcttccttgatgggaaccagtggtgtcaagccctgagggctaaccccagctttggcctccatagcattcaggatgtttattagaggatgtccttgggatcaacacctgcagaagagaagaggaagaggcaagagcgtgcagagaaggcaagctggggtgcagcccatcaacagcctccactggccccagaaggaattggggaatcggaggggccttcagtgttgtctcccattggggcaggatgcaccagactttgatcctccttcacaattgcttattgggtgtcgggtgcctgggaagggtgtgacctcgggcgaggtggctctctgcgactcaggcaatcttagaaggggctgagagccaaagaccgtgtgttgacagtattcccagcctcctgggcagcaagtccctctttgaaggggacgttggttagggcacccagtgtccatcacagttcattcaccaaccacagaagaccatcataatggtagtttgggtgccactgagaacaccaagttggccaagttgggatcagcactcagaccacaagatctcttctgtaggattccagtatccgcgttgtggaaaatagattgaaaagcagcgcaagaagtgatacagaatataaaataattagtaggagagtttaacttaatgcaaaacatggaaacaaaaggaaaacaaaattttaaaataaatgacatttgtaacattaacatgctatagttacttggtgaaacaacagtacacaggtttagattttaaaggggggtgatttcattttgccctaatctgttgaatttggtaaatcttttgggtaagtctgtgttgaaagaagcagcatctacctttgaattgactgttctccatgcggtttttactttttaatgatggctgtttccagggacatgatttgactagtgttaacatctgagtccttctactgacgaatggttttatattgtgttctacaaatgctgagattcttttttttatattccagatattgatgaatgcagcaccattcctggaatctgtgaagggggtgaatgtacaaacacagtcagcagttacttttgcaaatgtccccctggtttttacacctctccagatggtaccagatgcataggtaggtttaatgacaaacagcatgcatggtttgtgtaagtcagttccataacaaacaactttctaaacaagcttgttaaggagcacatataatttatcaactgaggtaaaatgtacatttttggaaaaatgttaaacagttgactgccctcttaaagaacagaggcaccttgtggtcattttggagacgttttgcctcccataaaagagggatgatccaggagaccttacaggtatcttcagtctattaattaatgttgcagtcgtgcagcattaaaccttgaagccatcccaggtgtctctctctttttacccccaccttcagtcattccccagaacctatgttaatttggcctgaattttttcaataatctcttaattggtctccctgcttcttggcttctctacaatccatcttgtcagatttatcttcctaaaatagtgcttcgattaaataacactcttgctcaaaccctcggtagttttccattaggacttagaaattagtggttttcagtctgtgtccagtggatccttcaagtgtttcaaagccctccagggctgcagggattgcggagggcacagagaaaagggagagagctgagtggaaagggctcttgtccccccacactcccacacacattctaggcatagcaatttcactttatctgctgtgagtgttagacttccatgtcaggtatcaattaaatcaggggttctattgtttaaaaaatagatttggctgggcgcagtagctcacacctctaatcccagcactttgggaggccgaggcgggcagtttgcttcagtcaggtcaggagttcaagaccagcctggccaacatggtgaaaccctgtctctactaaaaatacaaaaatttgccaggcgtcgtggcgggtgcctgtaatcccagctactcaggaggctgaagcaggagaatcactggaagccaggacgtggaggttccagtgagctgagatcacgccactgcactccagcctgggcgatagaacgagacttcatctgaaaaaaaaaaaaaatagatttgacagctgctggatttaataattgttaagacttctttaaaagtgcagtgttctagattaaaattcaagttccaaagtgcacagtctgatatttaaggattttaagagagcttcaaactacatgaggattaagacatatttacatatcagatggttcacattttaaaagttactttctttttatcaaatgtatccatactaactttttacaaaggaggaatggaagggaactaagattcatggatcacagggtatgaggtgttttatgtaaattatctgacttgatgttcatttcacagcagtattgtagatgggaagcagctgagattgagagaggttagataaataatggcccaatagtttaagtgggtagtgagagagggatctgggattccaccgtgacctgagtgcacagcccagatttccctcattttgccttctacccctcaactctggatgcagttcactctttcttgccagatccctaggcaagccccgtttcttctttgcaactctgttgtgcccataattagacacttgtcatacaaaatgatccaagtgacctttctgccttctggtgctcctatttccctccatggtaagcaacagagacccccaaaattatccgtagtgatgagaaaatacaaatagcccctgacagtataaacaaatccaaggcttgttcgtaagacagttgtttggaatgagtaggtctcaccaatagaaaacctcctatgtagatagtggtatgcagtatcttccgtgcacatttcttctaaccgtaaaattccaactgtcacctgctgccaccacattctgagactctcagacctcccagccccgagctccctttgtgttctaagctcttttagtattattttatttcttgttctgtgatcttcctgtggcatttgtaatattgcctgtagggttgtctttttatattgttgtgttctctctcttcgactcctaggagtcataaagatgtcctttccctagtttgagcctcacaactcctaactcctggttgtacacaaccatgttcgtgacaggttaggagaagcctgttgacaggctagacgacctgcaaacgcctatttaatccataatatatttgctttgatataatgtgatttctgggtcctgagaataagggccaagtgattcaaaaggggagaaaagagtgagatttcctcctcctcttcgccagatgtcttggccagggcagatttaaaatggaaggtgtttgtggttccttctgtgtccctttatgtccccttagcttgagtcctgaaggtcttcaagttattctacagccaccccttaccctctgtacaaagtgacataccaccacaacggttcccccccccccccagccacccttggtgtggcactgctgcctaacgaagtgaaaaacttcaggctgctgtgtcctggaggtcatttactccaaatggtttccaattttcagttttttcttcctttacttattagcctgtaggttttcattaaaattataagttatataaatgtgtatttttaacaaaggtgcttcttcagcaaaaaaataaattagaaaaattattattatatgtgcaggtgccatctgtaaatcagggactgccagtaacccaaacttgatttgtaattttttttacccccaacattcaccattttgatcaagagtttgtgatccattgatttaacatataagtcagccagatgggcaataacatggtatcatagttgatttgcaaaataatagacattagcccattaagcttttgtcattggcaactgtaggccctagttttgctctgaaagatagcccatgctgaaaattatatgtacaaattccataatttggtcaagtgtttacactgggttttgaccaccgaattcatttgaagctgggatataagccagttttgaatatctcttcccattctgaacagtctttggtttccatgccccaaatatttactaattcccaagtatataaagtattagtggttttaaggcattacaaattagaatgtaggaagttcaatttctctgccctcttgacgggggaggtaccacctgaggcttcacagagagcatacttgtctatactccctctccagccgtttatcctggaccaggctggaataaaacttgttctgcctctttggtgaaactattagtctgaccagaggtacaggaactggaaccacaaaaaaattctggaaagcacatttatactggctagtggttttaagtacttttcggaaataatcttgtatcctttaaaactgacccataattttcttttatggtttgtctaggttggttttagtcttcttcacttgatgttaataatttaaatgtttctaaattagccttgtttttattttatttcattttattaatttattgaaacctcaagacatgagggctttgtgttcttaagaatgatgtagatgataacaattacaggtatgaccctctttgagaaaacttgaaatttaatattcagacttacaggaaacccagggatggatttttggctatgaaagatctttgctttacaaaaggatttaacccttatattcctttaaatcagtggtccccaacctttttggcacaagggactagttttgtggaagacaatttttccatggactgggagaagaggatggtttcaggatgattcaagtacattacatttattgtgcactttattatacacaataaagtgtattatattaaattaattaaattaatacacaatattaatttattatacacaataaagtgtattaaattaattaatacaagttaatattacatattaaattgtaatatgtaatgaagtaattatacaactcaccataatgtagatcaatggaagccctgagcttgttttcctgcaattagatggtcccatctgagggtgatgggagacattggcagatcatcaggcattagattctcattgggaacacacaacctagaaccctcgcatgcgcagttcacaatagggttcaccatcctatgagaatctagtgctgccactgatctgacagaggcagggctcaggcagtaatgccagcaatggggagtggctataaatacagatgaagcttcactcattcacctgccgctcaccccctgctgtacagcccagttcctaacacgccacagaccagaactggggattggggcccctgggggttagagacccctgctttaaataacaagcatattgacgatattatttgcttttcaaaatttaattttatatgatctctgtagagatatagtttacttgaagagaggtacaccctcagcacatgtcaggcagtaaaagtgttttgcattttgcttacctgccttcactgtttcgtggtaatatctcaaaggcatatggagaagttaggttttcctatgccacaaactctttccgtaacccagagctgcgctgcagtgtgtcggatgtcatgacaattagacatgatgtaacccaataaaagtgatatagaaatgcgtcttaccatgttgctttgagaagacactttctgccaaaaacaacaacaaaatccttctagagctattgtatcctataggactaagaacttggaatcaagggccattttgaagttataaataactagtaccttataaaatctgttagggccctaagacaaaaggaaatcttgattaataagcattggatctaaatgcaaagtgactcattcttcaaaaataacaacaacaacaacaaaaacttatgtctgactctcacagttgcagactggaaaataagaaagatcttttagaaatgtagactaaatgttgttttaaaatagatttacatattttcctaaaatggctcgaattaagcagtttgaaaccagggacaacccagtctctcttcagcatagagacatgtctttataaataataaactgtcactgctagtgattttcttagtctctcttttcctatggcacacatggttttaatcactcgttcccaccttgggtatggaatgtgggacttcagccaagtgcactagcacacaggggcaaaaggtgtgagaccagggatttctgactgagcactgttcctgtgcagcgctcgcagcttcccttccggggggcagaggtgtgagttaatcctgccgtagccccagtgtgaagtatggagctgctcgggcaggggagtgttgttacaagtattatctcagcgatgtgtgtgtgtgtatgtgtttctttgtcctcagatgttcgcccaggatactgttacacagctctgacaaacgggcgctgctctaaccagctgccacagtccataaccaaaatgcagtgctgctgtgatgccggccgatgctggtctccaggggtcactgtcgcccctgagatgtgtcccatcagagcaaccggtaagagcccttccagttatctgcagaatatcccatcccagccctcacaagcccagtggcaatgtgcatgatgcagatgtaatggaaacttgggtaaatgagtagtctccaggaaatataagagatgacgtccagggaaatttccctagaaaatgcacaggaaaaaaaaaggggtctgtacaaagagtactgttttcaggtactgctttttacttagctggcttattactactaaacagaaaccttttggggaagtacttattctcattttagtacttaatggctctcatggagtactcaaaagctcagtagagtaaaactcagctttcagaatttttcaggtaagttgttcaggagacacatttcctttttcctaacattggactctttccttcctgctaagtcctgcttgttttttttttccttcacagtatctcttttatctgtccatttttttgtttctattagaagcgtattttctctagtctggactgttccagtagtctcctaactagtctctgaaatccaccattgccatgtacctttcccaaagtatgagtcagtgaagttcagtttaaaaaattgtgtctaggggagaaaaaggagacaccttttgactaattgagcctatttcaaaacaccatgttgtacacaatgaatgcatacaatttttattcattagtttaaaaatacataactaaacaaatacataaatacagcacactttcgttagtcgagaaagatgtccaaaaatatttccccaggatgaactcaggcaatatttagtggccaattcactccatttcttgcaaagaacatttgctacttagcacagtatttagagtcccaaatctaatcccagttcatctttttaattcttgttctttatagtagtttaaattatatgattgagttttcattgcacccaatccgagcatttctgaattcaagttggcttttttttctaaaacttcttgccagttcaggctctttctccctactcctgccatccttgcctgttatatatcctcttttcttgttaaggatctgctcaaacatgacctaatccatgaatatcccgaggtacctgcagctggaagtgctcccttcttccttgtgctcctgtggttctggctggtactatcactatggcatgagtgccatatgtgtgttcacatcttgctcttttactggttgatcaatctcattaggaaatctcattcattattgtagtctcatatttctcatgctttttacacttccatagtatttagcaaaatcttgcttataggaggcattcaaatacagagagcaacttattaggcaacatctttcccaccaattgagcatatttcaaaacatcacgttgtgcacaatgaatatatacaatttttacttgtcaattaaaatactaatacataaataaacaaatacatagatgaagtttaccttcctgagtccagtaggggaccatttagtagatcactgtttagaagcacatgacttcctactaagacatggcttaggtaccaggagaatggcttttaaaatgcatatgttaacttaggaatcagcagctttgatgtggattccttcctgtgttgaggctttgaatagagaagaggactagagcaggtttaggtgcctgcaggaagacctactttgggacagttggagcagaagaccaggttcctgtgtgtggctttacagggagctgtcctcccaggtataccactgagagatgcacagccctcagaggccttgggcaaaacagatttatagagcaaaataacttgcaggtaggtttttgtttgtccaaatgttccagtactggtgctacagagatctgggctcttacagagagtgatgcaggaaggattttagattggccagcttttcactctttaaaaaataaatcagcatcatcttgggttaagtggagataggaaagatggacatcagcttaacaaaattagccccacgttgctgatcctgaatgtaaaggggcaatgagaagattactaaatctgtaaaaaataggaagaaatatcagattcagtctgatacagtttcctagagaggttaagatgaatttaatggcattcttaaagtaaaatacccacctaattagcagaaatgctgataagctattaaatttcttttatataaattcaaaaagtcttaaaaagaaaggccgaattggtacctacaaatgcttggaagcaaagtgagttccttaatgtaactgtcatttaataaaattaacacatagttaatgaattcctgttatgtgcaatttgcagggcaaggctgagagtgggaactagtcatgagttagagatgatccctgacttcacagactacacagtcttagtggtgggaatttggtgagagcaggttcccagggaatggtggatatggcacgtacagatgataaatctataggaagaatcactgttggttgacaaacaggattgagacatcttgagtcagggaagcatgaacaacatagaattcctttacaaatacattcaagtacgtcagtatctctgtaatttgaaattccagtgaaatcgtaattaaaatgctgtaagagaattatctgaaaacataaacttgacctgagatggaaatgtcaaatatgaatgaagaaattttagaaatggaccagaaagtaccaacagtactttcctatttaacctcatgtaaattggcagaatgtcccgtgaggttgaaatatgaatgcatttcagtaagacctattactgtctgaaaataagttaaattttagtctgtaaggaaaagaaaaatattagtctaatttctattaatggctgaaactagcatagaaggtatccatgagaaaatcactgtacaactgtgaaaataaaattaccaaaatcctagcaaaagaggaaaaaaatgaaatttaaaagtcacataggttacttatagaagggaactatgaaaaaacatggctatttgtaggcaacatgaaaataaataaaataaatacatccttggaaacctggatactgcttaaaaacacctttttggaagcccagaacaaatgtgtggaaacctaaagatgatttatttgataaagacctgacactgtgaaaaatagtaatcatcctaaaaatgtagaatcatagggaagcagatgatgaagtcaggatgtcctcattcagagggtcactatgcagcattcatacccgacccacaccccttggtgtttctcctcccttatgggccacttctccattgatattgctttcttttacgaatcagtattcttcagggttctgtctttgcactcccttctcttccccttccacaccactcttacatgagctcatccatccccatggctttgagtatcacctctctgtactgatgactctgaaactcacgtctagccttgattcgtctaagcttcacactgtcttttacaactgcgaagtgatagctccacttggatgtctgatatctcaaaactcctatgttcaaaatggaacttggtttctacccaccaaatctgctatcaccatgatttttcccgtccaggcaagggcaccaacattcacccaattgctcaaccagaaaactaggagtcattcttgacttcttgtgtcctgagctctgacacttactacttcactgagcactatacatttatctcaaaaatctacttcactgaacactacacatttatctctaaaatgtgcttcagatttgtccacttctgtccgattcaatcactgactcccccatccggacatcatcatctcccccttggtcttctgcaacagccttgcctccccgcagtaatgttcttcatatgttgtaattgtaagcatgatcttctgaaaatggtcatctgatcatgtcccacccccgttgaagacatccagtggttttgcactgcgcataaaataaaattcaaattttttaatgtattctgtagagccctgtggaatccacaggtgggactggatggagaaagtagtacttttatgttttccatgaggtgaattttgatacagataaagactctgaggttttgggaggaacatggttttggatttgaattattgttccagagtggttgctgctgcaggtattaaaaatgggaatccagtcagttggttctttttcttttctccagttgacctgtgaattttgaggatcaattttattcaaaaatatctttaaaaaaataaggatgacttctgtgggcctatgatcataagctacagctcagctgttgtgttttgttttgttgtgtttttctagaggatttcaacaagctgtgctctgttcctatggtaattcctgggagaccagaatatcctcccccaccccttggccccattcctccagttctccctgttcctcctggctttcctcctggacctcaaattccggtccctcgaccaccagtggaatatctgtatccatctcgggagccaccaagtaagaattcaaaaatcatctagttatttttcttgcattgttcaagttaacatttttttattatttatttatgctactttagtcattaaataagtttgtaaattgttatattaatttttggtttacataatgttatctatatctatatcatatgtatgtctcaattttcctattgcatagagaaaaacgggaggcttcctattctccagagattaatgtccttttgttattggtgttttcaggcaactatgggagagttatgggcgatagttaaatctgattcacagaaaggattaatagaggaggtataatattagactttaggttacagagcttgcaaggcagttttataagtagttcaataccaatatctctctgcctttgttatttctgcaaactagaggtttgagagtgaggtggtgaagagggcagagaaaagcaggctgcagctgggttgtgagctccccagtgctcacagtgcaatgtgatctctgttggcagggtggaaatatgctctgttgtcaccagacgacctttgcccaaagagtatcctctttcctttctgattcaacatcttgttcattattgtcagattaagtactgatgaaagataccatagttaaaataattttaatggggcttaatgttcttctaggggtgctgccagtaaacgttactgattactgccagttggtccgctatctctgtcaaaatggacgctgcattccaactcctgggagttaccggtgtgagtgcaacaaagggttccagctggacctccgtggggagtgtattggtacgtgatccatcctaggttggcaccaagggtctgttgtaattctgttccttgactctactggttttctattgctgctgtaacaacttaccccaaacttggtggcttaatacaatacaaatttaaattatctttcagctctgtaggttagtagtccaacagaagtcttactgggctaacatccaggtgttgggagggctgtcttccttttggtggctcttgggaggaatccatctctttgcctttttcagctactagcagctgcctgtgtccttagctcatgaccccttcctccattttcaaagccagcagtgttgcatcttcaaatctctttgtctctctctggctctctcttgcaattccctcttccacatttaaggatatttgtgactgcatttggccacctgtataatccaggagactctccatctcaagatcactgattagctaccttaattccatctacaactttaattctcctttgctagctaaacatatccataggttctgggaattaagacatgagcatatttgggaggtcattattctgcctattaaagttacttttaactttcattgtaaaagatactcaaatcatttctggtaactccaatttaagacaccctaccaaaagccctaccattaaaagaaagcgttaaaaatatccccaaattatggaattttgcacattatactagtctaaatgtgtagcttaccaactctcttagactagttattttaaatggaagaaagaaagtttaaattgctgatgaggcatttaagctggtgaagggaggaaatgtaatgaaagaataatcaatttttggattggataagaacactcagctcctatcaacttgtttttaaaataagttcacctcttagttctgttatgaattctacttttataattataaatttatgatttgtcagaaatgatgagttcttactttcccaaactatttaatttcctgatgatatgaacaccccttctagaggtcatccagagctgagtagaagtgggaacatctaactcagggttgcggaatgtgaggtcaaatctgtatctggcactaagaagcatgtggacaagtgggttatctttgctaaattttagcttcctcttgtttacaagtagggtcatataaaccagtttatctctaaatgtactgataattctaagtgactgtaaaactagtgtgagcctgtgtattgaacacatctggggatgggggagactctgtggtgattgagaactgccctttaaacaacagttgcttcatgttttgttctaacattttagtggaactcagcagggaatgcttggatatggttagaccttctttttattggaaaaaaacagagcttcaagagatactcggaatcctatccagaagccacttctgaaatgttagtctgtttggtcctcttagatcagactcaaggaagaaaaaatgtttattagatcagattgttgagttgctacatgtttggaatttttctctgcaaaatgacacatgaaaataatacactttaactgctcaaccagtcttcaaatggctaatgacatattgtagtggaaagaaaaaagatccttttattatgttatttatttctcaaaaggaaaatgttttatatgtataaaaggaacccagaaagtcttagaattatgaggtattgctatgtaattttgcactaaaatacattgtgctttgcagatgttgatgaatgtgagaaaaacccctgtgctggtggtgagtgtattaacaaccagggttcgtacacctgtcagtgccgagctggatatcagagcacactcacgcggacagaatgccgaggtatggtcctggctcctgacgtggaatgtgggacatatatgctaactgggggttggcttcaaaggagttccatggagtttaaataacccatgccggaagagactaatacagtcccgtggcttttttgaacttagttccacctattgtcattctgaaagacagtgtcataaaatctggcaagcattgaagttattttataagatgcgtctatgcctgaaggaaaatcttattttcagtattgttgtctcgtcactattattgcctcttaagttttcatctgagaagtagagagtggaattgtcctttatgacacagcaactgaggaaaatttcagttgaaattatgtgcaattaatttcttaatggaaagttctaaaagatagggatgtcactctaagcccttgctgctttttagtgtggtcagcaacagcatctcctagagctgcttggaaaggcagaatctcaggttccaccacagacatactattgcagaatctatattttaacaagatcccccagcaatctgtatgtacattgaagtttgagaagcactgctataaatgtcccctcataaaaaatttcccatcaggtttattaactaatttattaagccacccaatatgccttttattaaatgactcttatgtactgagtttctaaaacagaaataaataagatacaatgatcactgtcagggagcccaaacatctatctccatctctatctctaaattaagcacaaaatgaactgtatcattaattcagtaaagacagaaaaaaaaaacaggcaaatactctgttaaagttaaataaaagggcccatcaatgatagactggataaagaaaatgtagtacatgtacaccatggaatattatgcagccataaaaaagaatgagatcatgtccgttgcagggacatggatggagccggaggtcattataattagtaaactaacataggaacagaaaaccaaatactgcatgttctcacttttaagtgggagctaaatggtgacacatggacacatagaagggaccaacacacaccggggcctattggagggtggagggttggaggagggagaggatcaggaaaaataaccaatgggtagtaggcttaatacctgggtaatgaaataatctgtacaacaaacccccatgacagaagtttacctatttaacaaacctgcacatgtatccctaaacttaaaagttttttaaaagttaagtaaaagatagcgaggtttatatcactttagaaaattggtagccattgacaagagttaatcttatttgcctcttttagcaaaagctcttcatgagttgaagacatatagaagttttaatttttatcagtgaactggcttcaaaatttatgaattttgttctcacgtagagatttcttgccaccagtgtattttagtgcactacatataaatgaccattttaagcagaaaaaaactggagcaaggactttgaactcactaacatttctattaattagttataaatatggataggttgaacacgtaactgagttgagaaccttcttaatattatgactattgtttaatataattaacatgtacaaatagcatactaggcattttgcaataacagaaaataaaatgaaatcaatgtccagagactgcactgttaaataagcaaagagaggtggttattgagagcactcagctggggcaaggaccagccagtataaactcatgtatgtggttgttatcaatctgagacttagtattggagactgaggatgacctgaatacttaaagcactgccttctttaagagctagcactaaggttatcctgaaaataagaagttgagaacgtgctcacattattttgctgatgaaagttgccacagaatggtccaaaaggctgtgcacataactgggaagtaagtgaggggccgagtagaaggggatagaaggatgggcagaaacacagtagaggagaactttgaatgacaagctttaaatttgtcttatagggcaatggggaaccccatgacattctgaaattgaggaagagagaaaaatatgaactttttatcctgtttattttaaccttgggcctcaaaaaattatgggatccttaaaaaaaaaaagtctgctcaagaatatgtggtttttaccatttttttttgagtgtggagcaagtctgatttttagcaaggattaagaaataaacgagagagaaaaagatcgtaggttgttggcacaaagatcagacagaagaaaagcccagactgcctcagctcgtccaatgacttgtgtggaaaccactgcaggatctgcccagaaagaaagtgcatctgagggccaaccacaagacaccacacagacacagggtaaacagtcagagtaactgacatgccatgaacgcacgtgctcattgttcaggggatatttagggcacttatactcagacaaatgtgacctcaactctgcatagataggaatgctcgcatccaactccacatagtttcttggtccctgtcttctgggaataagccctggaagtgattgtgtgcctgtgtagacaaagaggtttgtgttcatcctctttgatgtttatccaggtttgtagcttctagaaactgagagaaacagataatccagggaaccatgctatccactttgggtagattgttaatatttaagggagaaatcagatacaggttgtttcagttattgttattttaacacttccgtgtcaagctctgttgtgtaccttggcataatattaaccacaatagaaaaaaaggaaaaataccctcatagaatcaatattttatttggttggtagaatactcataaagttgttttttaaaagactaagaatctatcagcagtaaccctgcacgtaaaccagaattggtataaggaagatggacattttagagatgtgattgacggttttcaggcagaattaaggtgattgtttaaaaaaatagcatatgttgtattgttctgagatagctataaaatatgtcttttaaaattatatgtttaaagatgccagccaaatttcagtataaatagtgatttatactggttaaatagatgtgcttggaaaatggtgaagaagaatctattttgtttacagacttcggatttaaggagtcttattagaaattagagttacatctaatgccattatacaggttttttatcatgtcttttcaactctgataaccctaaatatcacattatttgataaccaatttatgttggagaatattattaagtaattaaaaccaaaagccaagatcatgagtttgcaaatggagggagggggaaataaaataattttaactcccctaaataaagctatttcttctttttaaactttgattttagacattgatgagtgtttacagaatggccggatctgcaataatggacgctgcatcaacacagatggcagttttcattgcgtgtgtaatgcgggctttcatgttacacgagatgggaagaactgtgaaggtaataatagtatactaatgttagtcctctccttccattgcagtttcaatatcaggggtctttaacaagaccaaataatgagtgaaatgtcaaagtatcaaatatgttttatatattttatctcaaaaggaagcctaattttccatgatattcatttcttaatttacatttgtgtgaatcaaataacattttaatatgctaggagagcttgccatttaaagatccctggtgtgatgaaacttctgtggcacaatttcatactttctaattttttacaatcagaatttgtacattttttaaaaataggacacacctaagtctgtgtattatctagccgtttataatctttttgtttaaagtgtctgcctagtaataaaatgctactaatcagtatctgaaatatatatctaaaatagatataatgtaaaaatacatgttatgtatattttctatatatgtaatatgtgtatatatattatgtatatatgtatttctgaatatgtaatagataatattcataaaatacatatttaaatataaataatatatatctaaaatataaataatatatatttaaaatacattatatatgtctaatatatatattatatatatctaaaatatgtatatataataaatcactttggtctttctaaagcctgtaagtgaaaacactgtgtctaaaagagcaagtgcctcccaagacagctttaatatcaaataaaataacatagtgatgaatttaaagaaccatccccaatgtttaagggatcttaaaggttcactgccacagctataatccatagttgagccatgtattctaaaagtccactttttacctgcccctatttaaaattgcttcaaactacaagttatcttctggttttcatctttaaaagaattaggatgtagcctaaatacatttcaaattccactaatcttagttttgacttatgttcatattcagagcattagaagtaatatgaatctgtgaaataaatatacccactaggctattagcacatttttcagtttgtaaactattattcctaaaaaggatcctgataacttctatggagtcaaattttataaatagatatacctatacatctagccctagagtttgcatgcacatgccaaaactcaagaacttgagatatgtatttcatatgtcccatcttctccttccttagatgatcttatttggatgaaagttagccttaggctgtaataacaaaaagaaagaaatacgaagaaacagaattattttcatccagattggtttccttcgtaagcttactcttctggtcataagaaaatgtatgttttgtattttcagatatggatgaatgcagcataaggaacatgtgccttaatggaatgtgtatcaatgaagatggcagttttaaatgtatttgcaaacctggattccagctggcatcagatggacgttattgcaaaggttcgtgctataaaaccctagatcatgttcttcacgtgccttttctcctccttatgttgtttagaggtactacctttctttactgattctccccacttaaagtaccttgaattttggtttgggaaacctgactgaaactccttcttaaatccagccatccaaagagctacagtttatgcccagaagactattgttatttcagaaagggtatttgaggtcttctcaaaggagtcaaaagctatgtagcaaataaataatccaaactgcctattggtcttccaacagatgtgggcattgttctcaagaagctgagttctacctcttctttccagttagggaataatggtggttaggcttcttggtggctgttatttgccacctcttacatctttacctggacagaatagtgtagactgttatttgcaatgatctcttcctcataatttcctctaggcatcttaagacacagaaattttttttaaggataatttatttcggctttatcaagttacataagcaagaagggaaacaggattaagcagaataaataaacaaccaagaaccatttttttagtttggtaaaccattttgaaataatctcattgccccaggtatcgaagcaaaaatgaggatttttatttttgctgttgagaattggggtcctaagaaaagttactggagacaaatttgtgcttagtgtctcctgtcttatgtagggatcagtgattactgcacttggtccaggatctgagttggaaccagacttcttaaagaacctcatactcaaagcaggtccagaaaatctgctaaaatgctgcacttagagcttctgggcatagtttcagatgcagaagtgtagagggtcaagctattcaaggtagaggaaagcagaataaagtcctatggtgcctcttctctgtgtgcccctagtggacagctttggtaaacgtgttatggaagaaagccttgtattaagtccttggcaagatgtgcattttctccaggcttaaaagaacttcaagcccttggttgtttacctacattctctatgaccttcacatcaatggctcttaatattgtgcaaacctgtcttcccagcaagagaaaacagttgggtgtttcaaatttgaaggaggaaggtggtttctgtacttttgagccctgtgctaggaggaacttatatgagaagacaggattaacacatagaaatattctacagtgtaaaatagcataaaacaaagtgccaaattgtgcaaatttagcactgtacaagtaaaaaagaaaagggaagagaatgattgctggaatatttggaattaggcttccaaaaaaaaataatagaaagagatatgaaagcccctttgtgagcagacctaggagaatacataatcttcttgatgatacacagagcacactaagattcactcttcatgcctctaggctcctgctgacccaggccacagcgtcccaacattaagtatggccaatagataatgctgtgacctcatagatgaaaccaggtttggcaaccattggcaaccagtgaaatagtatcctatcaataaattggttgttctattaatttgaaagtgctgatgatatggatggtttgttctgactttagcattctggcttaaggatctgagagagagagagagagagctccacagctctgtattattatcaatgtcttatttttttctagcttatagagcatagagtacacacactgtaataagactaaaggatgaaaaaagaaattaatcccatgtatactggatttcttcctttttataatttttgtctttatgccatagggtaagattttctcctagccctgagcacttagttctgagcccacaaagatgtgactgttcaaagctgaatcatcaatgctaattcagtctccacagttaactcatctgatcaacaacatggcttctctgttcactctctgaaagttgaagccactaactttgaccaaggttacctccctttggatctaccttacatctccgttcttattaaaaaccctttgtgttacctttcaggttgtagtctccacgttttgctgtgtgtcacaatttgaataaaaagttgaccagaataactaaccaatttgagttcctgtatttaaatataactgctgtttcaaatacaatctgtacacagaaccttggaccacccgaatatattttgtgccaaacaacacaagctaagtaaaacacgaaggtgttttactctcaatttgcctttttaaggtcaggagaaagttaatagtcccatacactagttgtatattataaaaggagttgttataaaatcatttgcttttttctttttctttttttttctaagacacagtctcactctgtctcccaggctggatggagtgcagtggcacaatctcagctcactgcaacctctgcttcctgggttcaagtaattcttgcgcctcagcctcccaagttgctgggattatagccgcatgccatcatgcccagctgatttttgtatttttagtagagatggagtttccccatgttggccaggctgatcttgaactcctggcctcaagtgatctgcccaccttagcctcccaaagtgctgggatcacaagtgtgagccactgcacctggcctaaaatcatttacttctaagtgttgtatgttttccaaaccacaattttggtgccttttgtacttccccatattaaggggggaaaaaaccctctgctattattaatatgtgtccgataaagtcttttaccagacctccttaagtatacacataaaataccataaagtgtttgtaaagtttaagaaagatttttctttgctgggttccaactgcatacagtgctgttattggccaagaatggtcatgaaaataatctatattcattttctgttctttttctgtggtgttccatcaaggctttagttgtatatcctttaattttaggcgaattttcccagagagccaagacatgggtgatactagaagtgatgccagtctgggtgatgaataccaaaaggaaagtcttcctgtagtttactattaccctagatttctgagagccctggaagagctaccctggttatacatttcacaaaaccctttgtcttttagcagccattgttctccttcctctgattctgtttttgcctttgtgattattttggatacaaaaatctcttgggagaatatattaaagttactttttatggaaaataagttccaacagttgatttctcttgattttgttactgttctttcaaaggaaaatgagaatgccatttgagcttttgttgctgatgctgcatattatttcctatcttccccattttcaagggttaaaacataattgtcaacatgttataattttagataaatgtcacttcatttttaataagtgcctttctctgccacagacattaacgagtgtgaaacccctgggatctgcatgaatgggcgttgcgtcaacactgatggctcctacagatgtgaatgcttccctggactggctgtgggtctggatggccgtgtgtgtgttggtaagaaaacatcatggctaaccttatgagagaggttcagcctctgtcactcaataaagcccaatggtaacaaacgctctctactgtagcagataagatataaagaatatttgcagagcaacaaaccaacagggtcagttctctttttgtgtaaattgaacattaatttgaggattagaaagatgagctaagtgaaaagcaagggaatccccacctatccttcccccttttcttccctaatcccgtagctgtcttcagttttctccaggcctcctttgttgatattggtcattgaaattgatgtgcatatgctattatctcatgatgaacattttaatagagaattgatgtccatgggcagtatagaatgcaaaggagaatatggataatccagaaacctgtatgatagtagttttatgaggctttataaaaagtatgagacttgttgaaaaattgataccaattttatccagattatttttaagaaaggtactcagtaagccatttgaattggaaaaggatagggcatagcaggagactgtcttcctggtggtaaagataacacagcttagttgaccaacatctacatatttatataacgaaccttttacagattaaactttctcctttttggaaagtatacctaattcagacattcagtaattgcgtgtttattttgggataggccgcatttctaataaaggtcttatttagcaggatgtgagattcaacattcatccatcattaattcaacatttattaagtgcctgctctgcacaggcccgagaaagacaaaataagtgagatataattccagcattgaagggcctcacattttagtaaaccatgatactccctagaaaactgaagcaatctggccattggtttccagtgcttagaagctgaacgtgttttgtttttctgtttttgtttattttttcttcaaatggagccccgatatcagaggcattccctgtgagttacaccagggatgatggataaataaagccctcttcaactttgacttggggggttctcatctgtttgaagtgacagtgtgatgacagatgcttcttcctgtttagacacacacatgcggagcacatgctatggtggatacaagagaggccagtgtatcaaacctttgtttggtgctgtcactaaatctgaatgctgttgcgccagcactgagtatgcatttggggaaccttgccagccgtgtcctgcacagaattcaggtatgtggtatcatggagatgccctcgtactgccagccttctgccaccattgaggtctttgcatttgtggaattcacagggaagatgacattttgctctccaggtacgccatgtgccttcttggggtcttggcagaggccagccagtgtctagtcacaggtacttatctaagcctcataattatttggaataggcattgcatttgtgcctctcgtataaactctcctacctcaataatactcaagctgtttgcaatacatgcaccttgccttgttttctaaagttgtttcatgatgtttgcattttgcagaaactattataaaagcagacttttacacagcgtaaaagtaaataactgtcatattacttgactatttccactagctttccaaaaggccatttgtaaattttgtttacatcccacgtattgattttggtgtggttttctttttctttcttcttcttcttcttcttttttttttttttttttgagatggagtctcgccctgttgcccaggctggagtgcagtggcgcgatctcagctcactgccacctccgcctcccgggttcaagtgattctctgcctcaaactcctgagtagctgggattacacgtgtgcgccaccacgcccggctaatttttgtatttttagtagagacgaggtttcaccatattggccaggctggtcttgaactcctgacctcgtgatccacctgcctcggcctcccaaagtgctgggattacaggtgtgagccaccgcgcccggaccggtgtggttttctttaatgatttgatttaacctgagagaaaaaactatttttctccagttgaagtgacatggcctaatgaaaagagaactggatagcgagtcagaattctcttcctccatcaacaggcagccaaattacttaatcaggggatttagttatttgtgtattttgcttatttctgaattttcctcacctacttttcaaaaggatttgaggtggcttatattaataaacataattataaaatagaataatgcagacaagctatccttagacacttcatctacaaaatgagttgccttagataatccaaaaggtcctgtccagttgtaaattatttctatttataaaacaagaatagattactgaaattaaaacaatgttctgccagtatttaaacacaattttaaggtagcttggcagtggacctctaatgtcctaaaataaagttagacctaatattgaaaatatgtagctctggttggttgtttttacatataggatttagtcagtttatttctgccctaaaggaaacaaattaaagagtaaatcataattttaaaagatttgttattttaaaaatgatagtatttgaaagtaacagttggaaattaaaatacactatgaaaagttagagaaagttaaatggaagactttaaaagaaatggggggccaggcatggtgcctcacacctgtaatcccagcactatgggaggccaaggcaggtgtatcacttgaggttaggagttcaagaccagcttggctgacatggtgaaatctcatctctactaaaaatacaaacgaacaaacaaacaaacaaaaagtcatgcgtggtggtgcgcgcctataaccccagctactcgggaggctgaggcaggagaatcacttgaatccaggaggtggaggtttcagtgagccaagatagcaccactgttctccagcgtgggtgacagagcgagactctgtctcaataaagaaagaaaaaggaaatgagggatgcctatttaaagaaaaaaactgctctggctaatgacttcacccggtgaataatatagaaattatcattttatgtatgatcaccaatcagttcaatatgtgtttataatacttttattatatacaaataccattctgttgaagacatttgcctataactttatagttgtatattattaatatcatccttttgtgtgttactttaacttttcaaagtactttacttacctactttgaatttgcaatacagacaagtatcatgaaagctggcacacaagagtacaggtgacttgttcacatgttgaatgattggaagagccaagatttagaatccaggaaccttggtgcatatagttatttgcctttgtattttcctctggaccaagtgcacttccaaagaattcttaaaatccacagggaaattatgtgggtttataaaaaggtgaccaaaagaccagatttctttaagcagttgtcttagtccagtttttgttgcagtaacagaaaaccacagattgagtaatttataaagaaaatgcattaatttctcccagttctggagcctgggaagtccaatatcaaggtgccagcatctgtggggggccttcttgccaagtcacttcacagctgaaagtggaagggcaacagagcatgcaggagtgagagaaagctagagaggactgaatgtgcttttataacaaagtcactctcatgataactaactcactcccataataatgacattaatccattcatgagggtagagccttcacgacctaatcacctcttattaggcctcacctcccagcattactattgaattggggatgaagtttccagcacatgaactttggaggacacattcaaaccaaagcaacagtaaagcttaaagagagttaaatgtaaggcccggttccactaacttttgtcttatatttgaatgaatttacccaaaaaagggtccacacatggaagtagtttcattcatttggtttctccacctctttggtcatgaaccatccgaatgtaggatatccctcatttcaagaatggggggtaggctgtttaaagtactgaaaatattcaaaaggaatgtcttcagtcagttgagggagagactccaaatatacaaaatctgaagttcatctttgtggtctgcaagtcaggcaagctacatatgaagctgtttctcactggttgctggagctgattcacattgttcagcaagccctcttgtgtcctcagccttctgacaatgacatttcacagacatggatcagttaaacccacgggagtgtaattggtcagttaaacccacaggagggtaattcggggggattttctcatggatccctcatgtcactgtctccatggcactacgcggagttagctcatcaacacctacccctcactatgtgtttataatacttttatttacttatttttttattcagggcctgagctgtgcacagtacacgttcaatcattaaacatgtaatgttaattctgtacagccaccaggtgaaatgggagttgtcattccaaatttatgggagaagaaactaacagaggaaaagggctgcttccaaaactcccagcaattagcgttgtcatcggtattaaaacccatgcttatttgaactcactacaaaaaatggtctagtaccagatcctgcctaaatggaaaacaatggtgacaataatttgcttccatttaggccaaacatcagcaaaattgtcattatctctaaaagtcctttttataaaactggtatgattttggttttcttgttttattacttacagtatttcatgcatattttagctttttgctgatacagcagaataaaaaagatgaatttctttttgttcccacacctggctttcaaacacaccttcccatctgttgtttttttgaccccttctaagatggtttgaaaattaaatcatcactgctttctcaaattcacatttgttagaagacatgataatctttggttgtataactcatttacctccaatgtcatcaggatgcaattctctggcatgcaggggataggaactatttgcttcagcagtgaggtgcagtcagcctctacaataagccccagccctgatatccagttctccttccacttaagcacagatgatttacatatgaccatgagactgtgtttgccagaaaccattggcaacttaaggggacactagtttcctttccttggatagtgtgattccagttagttctacattttcatcattcactcttatgttaagtattgttggaattgtatataaaacatggtattaattttaagaaatagaaatttgattctatctcaaatttggggacatattctttatacttcagttttttcaatatgatctcacagttttaacattaagcaatactttctctatggatataccatagagaatgaatccagtatcctgatacatattaactttaaaaatacacttaaatgcaagagtaggtattctgttgttgctcttgtgagaggaggctagagaatttgcagagagaaatgaggaaatgttaagaaccaattgtactgaaaaaacagctagcactgagaaacaaaattatccccaagatggtgggagaaagttttattaacagttaagaaaccacattttaacaggcacatttcaccgtaagtgtaaagtgttccctggtgaacaaaatcaagttataggaaaaacaccttttccgaaagggctttgcacaaggaattgctataacttgcctgtatccttaaaagttgttttccttgatgatgtgtagcctttaaaatgggagcctggtgtaaaggtgactccctggggagatacctccttttccgttaccacttaagtttggttctactcactttggaggaaatgatgtgtgcaaaaccaagggcaggatctacctgttctgcaaacaagggaatcatttactatctgttaatttattgcagcggaatatcaggcactctgcagcagtgggccaggaatgacgtcagcaggcagtggtaaggattcctttcaaaatttactaccttcagtatgtgcagaggcagcatcaggctttcttgtgggtttccagttgatccctttacactagtctggcctgactccctctctggccatcactgtgccatgtatctgggatgctcagaagccttcagtggcagagcagccggggcactgtgggctctaggatttctgggtgtggctgtgggacttggccactgagggggtcaggtgctctctcagtgtggttgatgggtgctcgcagatgatgtgtaatgacttttgttgctcatgcttgagaaggggcagcctgactctcttgtggatcttccactatcaagtaccactcgggatgatgggctagttgaaccattctccatctgcattctgaaggattctgaactgttaagtgctcagtattataaaatggcaatagagagcagtgacaacaattaactgagttaaaagagaatgaaatatttagctagagaaatattggtgccatgcaaggaattaaagttaaaaaggagaattggaacaagtatgacaataggtgacaagaaagaggaagggattattttattaatataaagctacatagtttgattcagggagatctgaaagaacatggactggctgaattgattgtcagttcattcagtatgattagtttcatcattgtgcgtgaatgaaaatgtggaggggatatttagaggaggaaagaggagaggtaaggaaacttataacgaataaggagttaatggggaataagtaagttgtgatagggacttggaagaaaaaaaaaaagtcaaccctaatttatagaagagtcaggcaccaggatttgagactatccattcactggttgtcattctgcacctgccttgactatgagattccctcctcagttgtgagggtacagaagagggagggccccacctcaggtgggcagagcaacggaggctttttcagagcatgtggtgttggagctggcttttgacctgtaaataggcctgctccaagcattcctgacacagagtgaagagggcattatatgttcatagaagagtgtgaagtctgggataagtaaacaaagaatttatattttagttttatcttgaggatattgttgaacctatgaaagtttgaaccatgagaacgatataataccttgtttttaggatggtaagaatggttgcagtgtagagtagtgcagggtagatggaagaaagaggggctggtggtagggagaccagttgtcgggacttgggatctgctgtcgatccatttttccatcttggtgcttggactaggagaagtccaggaggtctccttcagcttgattaaggattggttatcttgtagttccagctgagatgcaaagttcctctcaggaacttgtgggagaaagattggactcagaatatcttacagtgagaaaaagagacagagtgttctctttccagtgaaatcgatttttttcctcctgtagctcctaaggtcattacatttattgtagtgttatatttttaacaattcattcagtatttattttataatcttaattgattttgaccttttttgtggtgcagatataaatgaatgtgcactagatcctgatatttgcccaaatggaatctgtgaaaaccttcgtgggacctataaatgtatatgcaattcaggatatgaagtggattcaactgggaaaaactgcgttggtgagaagttttacccattttctgaaacattgcctgcataatgcattccttctttcattgctgggagaaaactgcctttgagtagcttagaggactgggcaaatggacactttatacttcggatgttagcacagcatatacatatctttagtaacaaaaatttacatcactgaatcttcacagtttatgaataacgatgtatcagattcactccttgaaatgatttgctccttaaaataatgatgtatcagatttcactccttcaaagagaagctccttagatataagatgcagagattctgagccattctcatgtgactacaaagtcaaccttgattttactgagagagaagcagctcttctcccaaccatttattagacttaatcagaaaaaaacacagcttattttcaggaatacctgctctcttaaagttgggttttgcttcagacaggcatattattcagctaaaagcaagcagttttcctgaggtccctgaatcatgaagctaaattccccatgacaatcataaatgctacagattactttgtactttataatcatacctggagacaatttgaattattataaggaagaaacacccattctggaactaacacatttcaaagttggaccatactttctaaatatttatttagttccttaaatcaataaggttaatccttttaattcgacaaaatgaattaaattatataaatttaattatataatgtaactctataaagattaatgatttccagcaaatctgtattttcttcctgctaaagaaataagtgaattaaatagcctagtgactttaggctttgtagatatttagtttagatacttagtttaaaaccaggtcaagcctctgttttcctaaaatgagatagtttaggtaaaagctaatgctacaggagttttgcctttttgcttgaattgatcacgtcgttatgactttaaagatctaatgtaaaagagcaaagtagatacaggcaaagtttgggccctttttaagtgtttattttcattgactttgcagatattaatgaatgtgtactgaacagtctcctttgtgacaatggacaatgtagaaatactcctggaagttttgtctgtacctgccccaagggatttatctacaaacctgatctaaaaacatgtgaaggtaaaccatatttttgttcttatactgtgtactttgctatcttttggaatgccattagaaaaccataagactgaattagagtctcctgtattttagacagttatgccagtttagttgaaattctgtggttctacatggcactagtatgtactttgtaagccacttatggtatttacttgtaattggcattttaattgccatcatttaatagataaagaaaatgttatgtgtctgctatttgagctattcattcagaaatcacatacacatttactccagattttctaaataaaaagattcagccaagtcccgtattctatactatagagatgtactagtctatactatagagttattattttggcattccatctagtgtaggaaaaactatttagcccagctttactgtgtgggattaaggatatgtagtagcaattggggtcaaagttgaagtactcttttaggcccaagactagattttagcagtaatgtagacctgtttttgtttcagacattgatgaatgcgaatcaagtccttgcattaatggagtctgcaagaacagcccaggctcttttatttgtgaatgttcttctgaaagtactttggatccaacaaaaaccatctgcataggtatttatctttctgagaatgatttttctatgtttatcaatgttgttatacttaatgtcagcttttcctgcaaaagaatttaagtatggatgaacaatattaaaaacttcattattccttgtttcaaatgctatttttgtctataattccaaggtgtatgtttgaatttttatatagattctattaaatattattccctcctctgcagaaaccatcaagggcacttgctggcagactgtcattgatgggcgatgtgagatcaacatcaatggagccaccttaaagtcccagtgctgctcctccctcggtgctgcgtggggaagcccgtgcaccctatgccaagttggtaagagaaacccatgctgtggttcctataccactccaatggtctttgcataaaaaggggaagcctagtatttcatttatctaggctcacatgagaattttcaaagatttaatcctgatggccccgaacatattgctgaatgggaaataagaagtgtcaaattttatgtgattttgttcatttattattttctatcttcacattgtaatgtggttagtttgtgttgcttccctggagcaccagtgcctgccagctctcttgggaaccttgtggttaggggttctgagctttttataggtacagattatctttcaaaaagctaattgatgtaaagaaaccggtattcatgactaaacttcataagggtttctggtgaacttctaaatctgttgggaacttgaggtttgagaaccttgctcatggttttgctgatttaatgtttaaatatataaatgtgtaaatttatgtgaatgctggaggccatgagatctccaaattatagacttgagttttctatattcaggttaaagtaattctatagtgtgattcctattttcaggtgaacagcaagagagaaagctaccttcagtttccctcttagctatcactttaacatgatctatagggcacgtctgtgtcttttggagtatcttagtggaattgagctttatttgaggagacatttcattactgttcttcctcacctatgcaatcgcagaaacattttgttatctcatacttatagcaacacaatctacttcatgttccaggtcatctttcatgtttcttacactatgtcagaactgcaaagtctggatattgttatctcaaatttgttttctgttttgtttttcgctttttattacagatcccatatgtggtaaagggtactcaagaattaaaggaacacaatgtgaaggtatttctgattacttataaaccatacatttttgtgtgcataatgaatgtttgtgttaactcggactggataaagctgtcatataacttcacagggagaaatatgcagcagagaaaaaaaataatgagaactacaaaacggaacagctgttaatttcacaagcatatatatactgttgctagtgtcagaacgctatgtccaaaggacagggtgggtggctgaaaatgttttaggttgatcgcagtttagagagactgcactttcaaaatgctatcaggaagagaaaaacaggaagtttttgatgagtctgtaaaatttgcctttctttggtttgtcctggcattttttatttgtttgtttcacagtcatgggtgatttagaaggacacattctgttttctctttgttgaaagtctgcatggagtttcttcagtttgctgtgattctttctcctggagtttcagatagacataggtcatggtgactaacacaacctgacatgacacagcagctgaaaaattttaaaaacagcaattagtcccatatgtgggatgaaatgaagttttttccctgttaaaacaaagaggcacactacaacccccacccaaggtcttgctttccaaatgatgactgaatcctttggcctttctctggtccagacccgctgttaataacttatctgacctcagcagcatattttgttgtacaagtggccaaaacaaaacaaaaaacccaaaaaggtagattccaccctctccccattgatctctcttacaaggaaagattcagaatattttttcaacattcctgttgtggaaagttatttcttctaaatagagacacagtgtgtatgagtttcttagctaatgttcccccctcttttttttttggcattggcaagtaagtgcctttcttttgattaacttggtggtgaatacttttccaaattaagtgcagagaacatattgctctccattaggcaaactgggaaggactggtacatttgagagagattggatgaatgatgaatgaatgaacatgagtatcttttaattcccctcaacccaagctgagaccaaagcatggacagaacagcctgagaccatggctgagttagaattgattgtacattttctggtgatttatcagaacttcttaaaagagacccttcactggcccacatattccttggtgggatatttttctatgctgaacttcaagctgtttcttctttgctagtttgaaaaaccaggtttttgcttctctactcatttccagacatctggtctcataaagcaaattatattgctgggaaccttacctgaaatgtccgcagctaccagagctgtctccaagaactcacaccagctgcctgtctctacaactcaaaagttattccctgaaaccaatggagaaactcttacatatttagtaataggtgggctcgttctggttgctattcaggcaccctagaaattctacacaaactacttgtaggcaaactagttttatgaacttaccaggttcaaaatggggaataattatgactctatgagtagaataaggtagaatgatattataaagatatattaactttatactttttttttctttttagatatagatgaatgtgaagtgttcccaggagtgtgtaaaaatggcctgtgtgttaacactagggggtcattcaagtgtcagtgtcccagtggaatgactttggatgccacaggaaggatctgtcttggtaaatactgagctcattatttttctaataataatttattaacgattattaaaaatgaagttaacaagatatagctgagcacttagcttcaggtacagacacacactccaaaattcagcatgtccgatagggtccatggccactcctttgacagtctttcaaatagtaagcagcaactgtagtttctgttgatatgcaactattccttaaatcactagcatcacagttatttttccagagctcttaaatcggccccatatgccgtgaactataaaatacaagctgagtggtggagaaaagaacaatatttgcacatatttggaaactgtagcccatgtcttctaagcataccctgacattggccagaaggacaggtccttgcaaaaacacctgtggagatcaggagtgaagatgccactcccctgaaaagtgaacctgagaaagctcagcccagggtaggtatcactgctagtcatagtgggatattctgtgccaactgctagagcccaaatgggatcctctagccaaattgtctcaccccaaccctaagtccttagaactctaagtcctaagtccctatgggctcgtgatagtggcaagtttgagatcgcacatctcatgcatctaaggtctggcagacttattctggtgttactactatggcttctgcctgcctagagtatatcccttggatcactggtttctgagttcatgactctggaaatgatgcttacctgtactttgcatctgaaaccacattactttgaagtgtaggctcagtgaagactattgtaggtagttaaaaaagtgggccgggtgcgatggctcacgcctgtaatcccagcacttcgggaggccgaggcaggtggatcacgaggtcaggagatcgagaccatctttgctaacatggtgaaaccccgtttctactaaaaatacaaaaaaagtagccaggcacggtggcgggcacctgtaatcccagctactcgggaggctgaggcaggagaatggcatgaacccgggagttggagcttgcagtgagccgagatagtgccactgcagtccggcctaggcaaaagagtgagactccgtctctaaaaaaaaaaaaagaaaagaaaaagaaaaagaaagtggtatacagtgaaggattttgatcacttacgaattagaattaacaaacctttaaatattgaactttatagtttatagtgtaaataaataatatggaatggaaccgggaattcaaagccaaaagtatttttgtaattaaggatgtcagttaatgctattctgagtcttagtttatttgtttaggaagaatcagtatttaatgagaatcttcttctaggttcttcagttgaaagatgcttcagtgtttaatttaggattcacttaaaaataatttatcttaatatgggcagtctgaatataaagctgaatataaagacttcaaaaactttctaacgttagaggaaacccagggagttagatatattgttaatgaccccattgtgaaggagaaagagaaggaagatacatcttacatttcaattacacttcattattttcagatgcataatctcagttgagcttcacagaaccttctgagagatgagtgcaacatcctgtaacagatgtggaaattcaggtttaggataatttattgaagacaatccactgagttacagaagaggaccaaaatccagctcttctgacctctgctctgctaggctttctgctcttctttataatcccatgaatttgggtttggggctagaggtatcccacaagtaccttgaagaatgtgcccttaagcacgtgtttaggtgaaagaaatatttgagaagtaaagtgaatggcttttctttgcatttttctctttaatctcaagtaaagcagtcctctttccagagttcatcattccacctttccaaaaatgaagtgggtcggaggaaaaggtgattgcactagggcagacacgctccaacaataaagagtacagttggcttttagctgtggaggacatgccaagacatcatggcatgcacgcatcggtgataggtatttctgtacaggagaaaaacatctcccgaaagaacactgtgggatctctcagaataccattccttatgtagaattatcagatgttgaaagggaacttttcagaagtaggaggtgcaaacatgggctgacaaagagagtctttattaggcaaggatacttaccccagagcctggggttttttttgaggaataaaactaattccagtcaataagtatacagcaaattattatgtgtgcagtattttacctaacagagtgttggcagtttggggcagtggaagccgtgtggctctatttaacctcccttgattccctctgacagatatccgcctggaaacctgcttcctgaggtacgaggacgaggagtgcaccctgcctattgctggccgccaccgcatggacgcctgctgctgctccgtcggggcagcctggggtactgaggaatgcgaggagtgtcccatgagaaatactcctgagtacgaggagctgtgtccgagaggacccggatttgccacaaaagaaattacaaatggaaagcctttcttcaaaggtacaatgttacgttttccatggccaattgcctccctttttagacaaataggatgcattttcatgatctcagcactctacttgatcatcccagcatggactttttgctttctgaattatataattatctttgtttagaaaagtatgaactttttgtttttaactgtttggtccaagaagtcctgggggttaaaattgttctgtatggagagatagtttcagatagtttctaggtggccctcttaaatgtcagttacgtaaactcaaaggaactttaattttgcttccaaaagctatggtaattcattgctgaagaaggacttggtgttctggagatttaatctcccagttctgtcttacatgtagaaattacttgcgtatttcttgagtgtttggtcttgttttggaaaaaggccctgtagtgggaaactcaggtcacatgttacatgtatgcagttttctagtgtacaagaagctctttaaattatattaatgagatcttgagctggatgcggtggctcatgcctataatcccagcactttgagaggccaaggtgggcagattacttgagtccaggagttcaagaccagcctgggcaacatggtgaaaccctgtgtctacaaaaaaaaaaaaaaaaaaaaaaaaaaaaatatctaggcatggtggtgcacacctgtaatcccagctactcagatggctgaggcacaagaattgcttgaatctgggaggcagaggttgcagtgagccaagcacaccactgtactccagccttgatgacagagcagatcctgtctcaaaaaaagaaagaaagacatcttaaggtatatacattaagaaaatatttttaaattgtacaaattatttgcaaataatttaaattataaattatatctttgaaatttttatatttttggcatatccaaaaaagcaccaaacagtattaagtgaatatctcattctgctacacagtcaattgatagctgtaggataatatattctaataatgttctatgtgctttaaatatagatactagtggtttagaatatattatctattcactcagcaagtagtggttaaatattcactatgtgtcaggcagtgtgctgggccctagaagtctgaatagacacattatttgcttctttaacaatgctttataaaatgtagaaatttgaaaggctagaaatgtttacaaagtcatatatctcatggatcatcacacattcttggaaatgtatactgccaagaccttaaatcaagaacttccaaccttcatgatttaaaatggtgggcattgagacctcctgactgcttgctcataaacttattttgccccacattttcttattcttgaagatatcaatgagtgcaagatgatacccagcctctgcacccacggcaagtgcagaaacaccattggcagctttaagtgcaggtgtgacagcggctttgctcttgattctgaagaaaggaactgcacaggtcagttaatgagccttaagggccaggagaggggacgtcctttaaaactctttatctttaacatattgtcgcaagaattaaggctgtcctgagactcatttgctgccacttgctgtttttgtgcagacattgacgaatgccgcatatctcctgacctctgtggcagaggccagtgtgtgaacacccctggggactttgaatgcaagtgtgacgaaggctatgaaagtggattcatgatgatgaagaactgcatgggtaagtttgggatcatttgatcaacacagaaagagaaggattccatgaagctttgatggctcatagcctatgttccaggttcttcctgctgccccagtgcaaccagtgaagttaggaatcagtctgcaacagagggagactgaggtagaaagaatgagggaattcatgctgtgggtttgtgggtgatggcggagaccagttgtgggcccttgagaagtgattttaacacctgaaatggatacccaggcggaagagaggacaattgagacagaagctgtagtagaggtccctttacaagatgtctgtccaacacttctagaaaaggtgattggtaaacttgttgctttaggtctggtttcctagaaacaaagtttgaaatggagattcttgcaaaagtggtatttcttactgtgagcaaattctctcagaaggtacttgtcaggaagtaaggagagcagggtagtgcaggagaagaaaataaaccaagagtttggctgcattttggttttagtctgatcctgcagggagatctggtgtatgaatagcaccagagagttgtcccaccttgagacaaggaggtcaagatggacacccagcaatgggtgggggaggagtgcttggtctggtggaggagatgaggcccccacctttaacatggtcatttccattttgcagatattgatgagtgtcagagagatcctctcctatgccgaggtggtgtttgccataacacagagggaagttaccgctgtgaatgcccgcctggccatcagctgtcccccaacatctccgcgtgtatcggtaaggagaaagactttcacaccatttacttgtggtcagttgtttgaatgacatcattgccaaagttggaagcttatgtttgggtgtttgttcttcttattttcccgacagacatcaatgaatgtgagctgagtgcacacctgtgccccaatggccgttgcgtgaacctcatagggaagtatcagtgtgcctgcaaccctggctaccattcaactcccgataggctattttgtgttggtaagttcttttttattttattttattttattttattttactttattttatgttatgttatgttatgttattttattttattttatttcatctctccctaaaacactctatgtactctgagttttgttttcatcgctacttttacttatctttcttgtttccctgcaatattctttttatagtggctcacgatctttggatctcatctccattatctgtttaaagagccagttaagtgaaggacataggatgttttagctctaataagcataatttgacccatgccgtttggatagggaacagtagcagcatgtgctttgtctacacacatgcataccaatgcacattaacaaatggtaactaaccacctgaaataaactaaacacggtgagtgctgtggaaaagagcagaaagctgagttgaaatcactgcccttatgtggtttagatcagctaaaagatttcaaaaaaataactattggaaagaagaccatggaatgttcatatcttacactgcaattgaggctatgcctggctctccttaaagatgggtttttgtgggacaagaattttgctttgtggtcagccctctgtaggtttagtcgtgctgtgaagagtggcacagacagtcctgtggctttattgtgccccgagtcaaagtgaaactttgtagaaactgccagtttttgcctggtttggggtgtacaccatgtggaactgccaagtctcacatggtttccacccaaaaccataaatcagcccaaagttttctgaaacatggcccaggacaactcagaacttcaactcaggttattgaaaaagattggaacctcagccaatcaaactgaatttcaagtttataagtgaatctgtggccaagagaatttcatccacgtgcctattatcataactgagatgtgttctcctagcacccaatacttctcctgcattgcaaatggcacatcatgcatggtgcaattaattgttcatctgtctcctggccacagtgtaatcattttgaagtcaaagattgtgtctgtcccattcactattagagtctcatctctagcatatagtaggtatgtcattaacatttgttgaaggaatcagtgactcagttgccctagaatgctttttcccctttatttgacgtatgcctggaaatgttaaaaatgtgccatgctcataaacacagagggaggtgtgttagcccatttttgtgatactgtaatagaatacctgaaactgggtgatttataatgaatagaaattattagttcacagttctggagggtgggaaatccaatatcaagaagccaggattttgcatggtccttcttcctacgttatcccattgaagaaagcacgagggtgaaagagagcaagagggggctgaacttgatcttttataacagcaccgatcccaccatgagggtagagccctcataggatgattacctcttttaaaggccctgcctcttaaatagtgttacaatggcagttaaatttcaacacgagtattggaggggacagacatccaaaccatatcagaaggtgatattattttcatttcttttagacattgatgaatgcagcataatgaatggtggttgtgaaaccttctgcacaaactctgaaggcagctatgaatgtagctgtcagccgggatttgcactaatgcctgaccagagatcatgcaccggtgagtaggttctagcctcatgttgaatctctcagtaggttcctaagtaaagtagtttagggcccaggctttggagtcaagcaggcttgagtccaaacccttgtttgtcatatattttaactgtatccttaatcaagatacctattattagaatcctcatctataaaatgaagttcaaattgcctgcataaaatagtatttacagagcttaccatagtacctggcatataataaatggaatataaaatacattttccttcattgaccagacttttgaagagtttgatgttttggcctaattcagtgcaactccaggtttattccttgaaccattggcaacagcatcacctgagaacttgttaaaaaaatgtaaaatctcaggccccattccagatctaccgtatcagaaactactgaggtagatcccaggaatttgttttcacaatctctccaaatgatttggatgcatgctaaagtttgagaaccagtggtctaatttacacttccttttgtatcaccctggctgcgagagctgtgagccaggtagaggtgagaaacaaagtgggtaataacataggctttgattttggcttggcttaagaagagaatttggatttaggaaccaaaattattttactgacctagaaaaatgtcccttaaaaaatctagatataaatttggctacaaaaattgttgaaaataaggccaggcacggtggcttacacttgtaatcccagcactgtgggaggctgaggcaggcagatcacctgagttcaggagttcaagaccagcctgaccaacatggtgaaaccccatttctactaaaaatacaaaattagttgggtgtggtggcacatgcctgtaatcccagctacttgggaggctgaggcaggagaatcgcttgaacctgggaggcggtggttgcagtgagccaagatcgcgccattgcactccagcctggtgacagagtgagactctgtctcaaaaaaaaaaaaaaattgttgaaagtaaatattattactaagagcatctaagtaggtatggttatttcaagtaattcttaccttaaaatattgctaaaacagttgatagaattcaggcatttataatttgacaatagggaaaataagatttataataatttttgaatgataaattaaatgaaagaaagattttaaataaataatagacttttaagcaggtgtggacgttgcccttgagcagtatattataaatattgaaaaatattttttccttttttaccaaggataacccaatgggctagtttatgcaaagcttcatttggatttgagagttaatagtcttatgctagtaggctaagtttatttgactgcggtcagttaatgttttctcactgaacagtggaaccaatatcaacaacctgtggttgttggttttattctttgcagacatcgatgagtgtgaagataatcccaatatctgtgatggtggtcagtgcacaaatatccctggagagtacaggtgcttgtgttatgatggattcatggcatctgaagacatgaagacttgtgtaggtaagcaaagaagacagaatttttcatcttgtcttgttagtcataagcactgttaaattacataaagttagtttgggtcagtgatagaaagattccataggaaaagtaaggatatttagaggcacaatactcatattttaaccagcattccaaagagagctttcttgtggctattaaatggtactcttgtcagatatgttatgaggactgactggccattcgtcagctccagatggacatttcttttatgcctatccattacttttgtccacttaaccctccttctgctttgactatcatgtaggctttttaaatccttgactaaaggcaaacaaaatttacttctgacaagaatgcagtaaactttagaactgatctatttgttttgtatagtttctattgttatgccttcaaatttgataaacttttcttctacgatctctaatctgcctttcctcacatacagtgtatttttcatctcagatgttgtagttttcacctctaaaagttcgacttgggtattttttcatatattctgtgtctctgcataagttcaatcattcctctagctgtttgaacacatggaatacagttataacaacttttagtgtctttgtctcctaattctgtcatctgcattggttctaggtcatttgaataaattgactttcttccttattttaggtcatattttcctgcttcattgagtgactggtaatttttgattggataccagatagtgtaaattgtgccttactgagtgctagatatttttgtattcctagaaatatttttgaactttgttctgaagtgtaaattacttggaaacacatggatccctttcaaagtcttgcttttaagcttttaagctacacttagtctaggggtaattttgctctgttagtgaggtaagacccttctggatattctacccaattccctgtgaattatgaggctttccagtcaggctggtgggaacaggcacaatcccagaccccctgtgaactttgaggattgttccctctcattttcttgggtagtgctttccccagccttgagtagtttgtttccttatatgaatgtgctggtcactactcatctgaatacttgcagaagactcttagcaaatctctggcattgctttcttctgtgtagctctctcctgtcctttactctgccctatgaaccctaactacctcagccttccaggatgcccagattcatctcctcaactcaaggacagtgcctggctccatctggtacctcctccttatgccatgaagttaaaactctcctattcagtaatctcgggcaattgtaggattcacctagtttttctttctctcagggatcactgtcttttgttgcctaatgtccaatgtctagaaaaccactttttaaggtatctattgtctattttttttggttgtttcatctgagaatataattttaattcctgttattctatcttggccagaagcaagagtctggtattgattatatttacatttttatcacatttatcttctgaaagcctttactgaaaatgtttgaagtcctagaattaaaatgaatgtcataaaaaatgaataatttttaatttggaaaagaagtgaagtcttaaactacttacactaagacaaccagttcatctatcctttctttcaaaatatgaaaactaaattgttatcatcatgcagactgaattaaacttttcatcctgcaatagagtatgctgttctaaaaagttttctagactgtcacataaacgagctctaaactcagcatggagcccatctgtttatttgattaactggcctgctgcttatgggccagatgaaagccagtctgaataatgagcttgcaatgtaaagaatgaagagcaaatgtaaattggcctctaaaatttaacattgtttttctgagggaaagcattttaccttttctaatgtatttgtcatagttattatgtctcgaggggaaagtactcaatgatatcaaatagctacatatattaatagtatatatgttttacagatgtcaatgagtgtgacctgaatccaaatatctgcctaagtgggacctgtgaaaacacgaaaggctcatttatctgccactgtgatatgggctactccggcaaaaaaggaaaaactggctgtacaggtgtgtttgttcaagtagaacaataaaatattaagtagttaagagattggtatcataattatagattgatacatgttttaaaactcatacattttaactatattataaaacattttgcataacatttttcattaatttagcttccacttctttgaaatttgtcatcgtttatattggatccaagttgcaggtttttttcttgacctgtggggggaaaaaggtgtattgaataaattaacactgtaaatagcacatttttatgaggttaaaaatcacattttcatatcaaattagtgaacatgctaattaccaaatattcatggcccttcaccgaagcaagccttttccaataacctcctttgccaacacttcatttaaggtttataactggaattgctctttaaaggaaaacatcctacaattcatatatttcatcaattctcactagtcttccagtgccttaaataggagtacttttgatgtattaagtcatattagtccaaggaagtctttattcatgggacttagcaaatcttatgaagtgataatgaaaccatttgcaatgttgtctgttaccaatagcacatgagaaaatgttttcacaatatttgtaggagactatcctattaaatgccaaatggaagaagttactctgtgctaatgacattgtgtttagtttataagtgtttagttggtattttcaaatatgaggcaatgacattaagtccatggaatgatataataaagttttactctagttacttatattaatttgacagattatggcatataacataatttaaaacataatggaaaccatggtgagcttgaattaggtaactgaataatttcttaataaataacagtctttaattccaaaaaccagtttggcaagctcttatgacttaaaacaaatattaaaatatttgcagattggcagtggggcaaatgtgcagatcctcctcttaattatatcaacatatttcaagaaaacaccaaaatatatttattattgtttcaaactggccaataatgctatttcaaatttattgatatgtaggataagggcaataatattattgttggttcaaaaataacagatgctagccaaattatgagaagaagcatgaagctggaatgttttcattttcactatgctactccttacatgaagcctgtctaggggtccattctgataaatggcacagtgtttaaactctcaactcctatacggcctctcggtacaaatggtgcctagctttgtatgtctatggttcaagctttatttttagcttccagtataaatataggacttggtaagggatgatggtctggcagtagtgaaaagaaaggtaagatagttctgtattatgttttaactaatagaggataatactactgttttgttaagctgagcacattgaaattcaacccagaggcagtgatgcttatgaaagaagttaatctcatggaacaaccttcattccccataagaaagaggtctctagaattcaatgctccaaattctagctaactgggtcatgtgcagtggctgattattttaggccttaccctgaagaaagcttaaattttcatgttatttaatgtagttttaggtaaatgacatataatgtatacaatgctgttggcgcagtgctggtcaataaataaaagctattgtcaaatgaaacatagacacagtgtctagaggccattttagtgaaagccattgcttctagtctatatctattgtccattgttttgttgtttcatttgagaatttaacagtctagcaaaaattttatgctactgtttactgattcatgcttgaactcagtttaaagaaggaaaatcttactctttatattgaaaggcttgtttttcgtagttgaatttgcacagatactaagaccatggtaacagagctgtgcactacagttgcatgaagtgacaccagctttacgttaagaacagcagcctttgagtcaatcacatgaacatagatttgaagtcaaagaaacatttgatcctcttcaaatctttttcatagatttgaagtcaaagaaacacttgagctcttcctccagttttgaaaattacagcctaaaatgattttccaatttgctaaaatccagctagcactgtaggaagacttgagttttatgcccctttgataccagagtaacatggcatgtgatattctcatctgaaggagtagtaccctgaattgtgttcttagtaaatccactcattcatgatcttgaacaaatcaccagggtgctctgcagttactcaaatgttctccttgggtaagtaacagccctgacctgtggaagggcatcacatttgattggaaatggcttaaccaaacagtaagtttggtatacttgaaaacgtgtttttaaaaatctggggcaaaatgttttttgaatgccatgtcactaaggctcttttagctgcttttagtttaaaattcgtgtcattcacaacttagaacaccgtcaggttaccttggtgatggctttgctaataatgttccaggcaactaatgtaagtagagataggtatcttgcctaattggataagcaagcagacaaaaggaatatgtctacttatttatctatttatttatttagatagattattgtttaatgaaaagaattatgaaaatatgtatgctattttataaggagaaattttgcttcatgagaactaagaaaaagacctctgggctccattacagttttgtctaaatatttcagctccctgtcattactgagtatttccattttaacaaataaacatgttttttcccccaatcactttagcaatgttcagaatccacccactgacttacattcccagcccacacagatgctaagggtttctttttactccgtaagctttgttcagaccctgggtattgccaagggggaatgttccatttaatggagagagaacacatttgcttgaaacgcagaacacagctcttctatccttggcttaagtgggctggattacaatttttctatgacccaatgtaaggcttctgctgcttgttctacataattaaggccctgctaggtgtcatctttgatgggtggtcctggctttcacaagctaattttaagaccctacctcccatcatgtgcttacttagttaatgaataaagcaagcataccattaagtggaattaaatcagacttgttttcagttaaaatagcgggatttctgggtaattccatattggaaactagctggtttctttcataagagaaatgtctctggtggatcttggttcataggagagaatcatatatttcaaccaccaacagtcagtgagaatttgtgttcatttccttccagtttcttatcactgctaattttccttcactggctgtcggcctgtgaaaactccatgggtgttcagttaatagtgttggctcaaatttggatccaaattaagaaatccaagtagccttcacgtttggcctctccattcatggtaacgccctcttcctcaatgcctaatcaaggagtttctgcagtgcacagctctgccaggttaggatccaggagacagatgcccagatggcagagaaggcaggtgtttgtgtgggtgatacagcctctccctgcgtgactgtaagaggaggccacagcagccccgggcacaagcccatacttggatgacatacttgcatgggacatacccagagcctgtgagcagggtctgctcacaccacacccttgcccttcaagagagccatgcaagaggacctttgagtctttgtgacaaaggtttggtggggttaagaaggttgcggtgtcactttaagtttgaatttctttgcttttcttggcttatgctattcttaatcttaaacaggaattttctgtttgcagcgaacttgtgcaggaaagagaacatttttacagaaagagatattcttggcaaacatgtactatgtttccttcatgttattgaagagtgtttcaatacagcatttttgtttgcttgttttccttatggctcactttccccttctgtttgcttttatgatgaattacagtccaagtctgccacagaaacaattaatgaatgatagttggtgcatgcatgcacacacacccacatgcaaaaaccttttatttggagatgcttttatactttatgaccacttgaagtctctccaattgttacatactgagagtgtaaaacattgagataataacttatacaaatagtcacaaaatggagaattgaatattggctcctgagttactctctcctattacccaaaagcccatgatacacagcctgttgtaaatatagtttcttttcaccttgaaaacattgccataaaactgaaaacactttctaaagttgtaaatttctattagcatattactgatgatttttaaaggagactttccattaaaaagaaatgataattttcttaattgcaagattaaacatggaaggtaaaagccatatgaaaatgataatactcataaaataagagtacctctggtcattagaaaactggaaagaaaaagattacagaattactagattaataggttgtggtcatctctgaaaattatgcttagtagaagatattagtgagtatttctataagtcagttaatattcaccaatattttggtaactccataaagcaaggcttagaataaaatcctgatatgactaaagaaatgcgctcagctgggcgcagtggttcacgccttaatcccaacactttgggaggccaaggcgggtggatcacctgaggttaggagttcaggaccagcctcaccaacatggtgataccccatccctactaaaaatacaaaaaaaaaaaaaaaaaaaaaaaaaagccaggcgtggtggcaggcacctgtaatcccagctactagggaggctgaggcaggagaattgcttgaacccaggtggcggaggttgctgtgaaccgagatcgcaccattgcactccagcctgggcgacaagagcaaaactccatcaaaaaaaaaaaaaaaaaaagaaaagaaaagaaagaaagaagctcagctaggcagctgtggcccaagggaaggagtgccaatcaccagatggggaaactgagtttcaggaggtcctggctctgcccctcactgacttgtagggcccaacttctttgtcttcttctgagaaactgagattgggagaatggaattacgagttctttccacttagaaaattccttgattctataacatctggaggctttgatacttatgcaattgaagctttttgtgtccacataagattatttgtcagagatcatgacaaatataggagagaaatttaggcaaaactccacaaaaatggtgatttgttgcattacctctgaggggagcaattacctgaggcagaaagaagtttcgacagccctgcttgggagtatttgtgctagttctgcgggatctgttaggtcaggtatggaaagacatacattcttgaattcctgtgcctacttagcactgttatccctgaattggccttcctcctcatttccttggaatgtgccatgctcaattatttagctggttaaagctcccagtcacagtctaaagctatgtgtctctcttgacctgcagtaataacttgataggtccatgtggctgccaaggttacactaaaatccacctatacaatgtgtcatgactgaaaggacattcttccaggcatgctgcttcatttttatgatcattagtgatattataaagttcttttgtaggagcaatctgttcttatttcattttgtgtttgctctagaagttatgaagaagccaaagatcccaggaccatttcagagcttcagatggaacacttggcagatagcatgtttgcaaacactttcaaatcatttaattgggcttcataagtaaacaaaaaggcaaacatgaattacttgcccagtttctttttcatgccactattcaagtgttcactggaaattcttgcagtgttttgtatggcaaaattgttcttcttgacctaagattggtgttagatgttggtttccatatagagtaccatatttatgagttcttgttcttagttaatgacaaagttgattatgagggtaacccattatagaatgggctcgttttggaaaattttcacttagtactttatgttcttttctgtaacatatttatgttagagagtctatcttggctaaagttgacaatagaattttggagaatagagcattttggaaaatttggagtcttttagtaatgtgaccctaatctggtattccttatattctgacaaaatccccattggattaacttgagttttacatgaaatatacaagaaggcttggctctccaatgtgctaggactctaagaagctagggaaaagatggcttatatactgtcttaaggaacattttctgcaaatgcttaaattagcaatacctaaaggaaagcttttgtagaaataaagcataattaaataagtgttttaagtttaagaataaaatatattttatatatagaatataatgcaaaaattttctaatttgccaacaagtttgtattttttgtctatacaagatatgaaaataatgtgcatcattactccatagttgacttactaaaaatactagcaaaagaaaatatgtgacaaggagtattaaaaccatagaaaattaagcaactcattttttatggtcttcagctgtaaaaagtcactttgcagtgactggaaacttacattaaaatacggaaaataattagagttaacaatagctagtacaatcatattgttatatctttataatttgaaatttaaagctgtttgatatatgtagagtttatatatggatgcaaaaccagtctatactataccatgggaagtttgaaggcaagtcaacttttgaatattacttattttaaaaaccaaaagacatttgtgctgagcctttttctaaatcactgctcatttttccagacatcaatgaatgtgaaattggagcacacaactgtggcaaacatgctgtatgtaccaatacagcaggaagcttcaaatgtagctgcagtcccgggtggattggagatggcattaagtgcactggtgagtaggaaagtaacagaggttgcttatcaaggactgcatagattacacatatgaaaatattaattatgtaaagttattttaatttgtgtattattggttttaaataccaccctttctgttaataatgatataacctttttctataagatctggacgaatgttccaatggaacccatatgtgcagccagcatgcagactgcaagaataccatgggatcttaccgctgtctgtgcaaggaaggatacacaggtgatggcttcacttgtacaggtatgttcacgctggaaacaactgtgtcaacactagtcagagaagccaggcattccacatttctcaggctagcaattcttttttgaagactgggtcagttaatagaaaagattcatcatttggcactagagctctgtgggaaaaaaaaaattggaaccaggtcaattagggagacctcaaaagcttctcgataggtagatacgtaggtagatagatagatagatagatatttaggtgccattatcacatcatttacagtgatctgtgctctaacataaaatgataccaaaaaagtcataccattctccacctcaagtcagctaggccttataatagttacaattggcatatatatcattatatgactgtatataatgatgtcattagtttaaacaaatcatacttccttttatatgcctagcctttatttattattattttttttttgcctatttctcaccaatgacttcctttctgtaccaacacaaggataagcttgctgtagggaactatgtaaggagaagggattagatgttctagattagaagaacagtatgtatttctctccaacaggccatcatcatcatcattatcgtcatcatcaacattccatattggtataagtaaaaatttcaaacctgctatggaattcattcacttccagttttgcaataatatattaatgaaattttctttttggctctaattaatagccatagaattaacataaacttctatacacatgtaaacatacatgattagacttgtcattacataaattatacatatacttacatgtgcatatatttacagacagcactttttatatcagagctctggagttaaataaaataataagatccattagccattaggtcgcatagctgctcctataacttaaaacattgatttatcctgagcactttgttcataaaaagtcatttaagcacaatagaggctaaggctcattaagtgatttacctggaatttttttttattccctgaaagttttatctcagatgaaatcatttttgcctaacttattgatgttttgtcatcaaaaacctcccatcattttgagaacatattcaaattccatgtattaggcatgtgtggtttatgtgtttgatatttaaatgcctgtgattattaagaaaactaggtagagattaagcagatggaatttttcttctccctatggttgccattcttttgcacttttggtgcccatctaagctaagcctgaaacttgagaaatagacacaaacatgatgtgtcatttcctgtcatgggtgtgccctccatgcggatgacccttcttgaacaggccttagtttgcatgattccttcggcttattcattttatatcattcagggtaaattatcattcaggattctgaatcagccacatgtaaatttcatattcagtgttagcctaccaaagagaaaaataaatgactttaaatgtgtcaaattgaagttatgccaaaacattgctgcactggaaagttgatagacctgaggaattagaaagcccctaaccgaggaagagtaacgtgtgtttctttctggctgtagaccttgatgagtgctctgagaacctgaatctctgtggcaatggccagtgcctcaatgcaccaggaggataccgctgtgaatgcgacatgggcttcgtgcccagtgctgacgggaaagcctgtgaaggtaactgatggggaagccactgggagccttgctgggcttgatgagattaggttatttaaacattcctgatgcttttttttttttttttttttaaactgaggtgtgttttagcttcatttctaagctggtcagttcagtttgtagagggattaggtttccagctgaccatttctcttgctgcacagaaaacctcagctgactggccacaagctgtacatccagccttggccgcatggtctgcaagggtgtatccattggtcaatgagggtaaccaagtgtggttaaatcagtgcaacccatttatccctacggagggggatgcaacctgttaatccctactgagggagaaaagagctgaaagtgcaagttccctgataatgtcctgttgtgggattatcactaaatatggaaacacaggttttaatctccactgtatttggtttgtagaaataaaagcagagcaaatagtcttgtccatacgtagaatggtatgtctcacatttgctctaaatatctaacatatatgaacatggaacagttttgcaaatctgttcaataggggacccttgggatactgccatatggcatggtatcgctcagctttaggctctgtcattctgataagtgttggtcagacacgaagagtcctgggaacctgttagctaaggctggatcccattagggaacacaagattcttccctttacccacatttgtcaaatttaagcacattctccttcattgaaaagaagatttcagtagaaataaacaaatgataacgattgtcagtagaagtttaaacaagaccctgattaatgtattagttaatagttgttccttgttaacaagacgtgaactcaaaatcagtcattagctatgacatgtatactaattccctcatgtatttttatgtgaatacttttctttgttatggaaccgttgggtgttctttatacagtttatattaaatatgcagagtttgatataaaactccttggagtcaagaaaccagattatgctcttgatcatgtgcctaataccttgtttacttttgttactccaaatatccaaggaaaacaggtactgtgccacctctggtgacacaaatagtcacagtgaaagttttgcttctcttattgctataagagaaggttttgtttgtttgtttgttcttaatataaatcatggctggtggagtggtcatggctatttaaagctagtctcaagcctgaaaatgtgactgtgtgtcaactgcacacgaagaatgttaacaggaggcagagacagaggcctggaagaagcgtgtgcggttttccaatctccgtcaacaaaggcaaacacatgccataggactagggacactggagattatgcaactaattatgacagttccctgaaagacattgtggcttgtgaaattttaattcacaacaaaaacagtgactacatagatagattaaaaaaaaaaaacgaatttagcgtaaggtggcttgcttgcctcttactttacgaaagtgatgtggacctacgtggaacactacaaatgagatatgtatctataaaatgctcagcccgctgcttggcatgtaatagagactgaggaaaagtaacctctcacctacgagacttcactgtgcatggcaaatcatctaaaagtctataggagaagtgcccagattggtgttagatactctgcattttcttagtatttacattagttgcctaattatatttggcaggttttttttagaaaaatataagttaagttttttgcttttttctccctccccccaagatattgatgagtgctcccttccgaacatctgtgtctttggaacttgccacaacctccctggcctgttccgctgtgagtgtgagataggctacgaactggacagaagcggcgggaactgcacaggtaagacctccactggcatcaaaatcagctccctggtgtcccgggggacccagctattggagcctccctgggactacacaagggccgtcacagaagacaagaaaagcaagggggaagtattaagaatcacagataccttttctcagacctggaactgattggaggtgaggatccagaggaaagagtctaagacaattgaaggagcacagtttgtagccttgaaattgagtttgtggctacaaaggaatgttctaggggtgctctagtggtgtagcttcccagccatttccttttctacttgggtacatttttggagagtttcgttttggaggccatgccccgggatcatgggttttctccttgtacttcgttgttgcaatacccaccccactccttcctacccctgccctgctcgtggtcaccagagtactgggtacacagagctcagccacctatctctagtgtataaatcattttcttgttgagccaaggactctcagggaacattagaaaaagcttagaaaaactacaggcacccagcagactgacactcggttctctttggcactaagactttgaaagccatttgcatttccccttcctaattcacccctctgttcaaggatactgaagaaacaacttatgttctgtatgagttcaaatttccggaaaaaatctggtcttttcaaccacctaaacaaaccatgactcaggggctctccagatcatgaccaccaccaccaccctgcaaatgctctggatggagtattcctctccagccacacattcttcccttggttttccttaaagctattacgagaccaggctgggtctcttgcatgcctcaggaagtccccctctccatggcctgtaccctgtcctgcgtgccccagatcactatcaacatcattctgtctaatctcgtttctgttactctggccctgtccgtccaaattcacatgcaatttgaacaaaaaaatcatctgcagcgcaacccgcaggagggttgccagatccaaggggaggaccaaggcaaaggtgttgtccctcttctccagtccctcctcacagaagccgtttgtctattcttgagtatttcatgagtgttcaaaacagacaaaaggaattgtacagagtggaatttgccaaaacccatgtcctaaatatctggaattctgtacatatttttggaatagaaactgaaagggaaatattcaactcagcatggatgatgggagagacactccttgccgacctcagggaacacactaagcctcacgcgtgtgtgtcaggggaagcagcaagagttgcccttctgagggtttcctgggacatcttgctctaatttgatgaaataacaagccacatatactcaatatattttcttaaaacctgtgtctgaatttttggttgaccgaggtcacaacagtgttttgccttcagttaccttgactggaatatttttcctagtgccaaagttatatatatatatgtaatatatattatattttatatatatatgtaatatatattatattttatatatatatatatttttttttttttgagacggagtctcgctctgtcgcccaggctggagtacagtggtaccatcttggctcactgcaagctccgcctcccaggttcatgccattctcctgcctcagcctcccgagtagctgggactacaggcacccaccaccacgcctggctaattttttgtatttttagtagagatgaggtttcactgtgttagccaggatggtctcgatctcctgacctcgtgatctgcctgcctcggcctcccaaagtgctgggattacaggcgtgagccaccgtgcccggcccaaagttatattttatcctgatgacaaatttgaatggtaaatgtgttctggggaaagaccaccaaagactatatcatatttccttcctgaggtgttttatctctgaagtggaagactgcatttctagatgtagttataactagtagctttaaaattcttgtttggagctctagattgggccctgttcttttatggtgatgtctgcctacactggctcaggtgataactccactactcactgttcggttttagatgtgaatgaatgcctggatccaaccacgtgcatcagtgggaactgtgtcaacactccaggcagctatatctgtgactgcccacctgattttgaactgaacccaactcgagttggctgtgttggtaagaccttaaaaacttttcagagaagcaagcatactgtgtattattttgaaaacagcaccaaacattccattctcaaagtttgcaaaatgaatgatacagaaatttaaacatttcctaactctactttagattcagatatcttttccatagggaaaattctcggtagtgtataatgttcatgggcactttttagtttctcagtaaaagtaaattacggtttttgaacagttcctgaagtgggtttgaattttcaaccccagtagaaagattctgcctgatgcttttgtgtttgtatatggtaaatagatacccgctctggaaattgctatttggatattcgacctcgaggagacaatggagatacagcctgcagcaatgaaattggagttggtgtttccaaagcttcctgctgctgttctctgggtaaagcctggggtactccttgtgagatgtgtcctgctgtgaacacatgtaagtggacatcctcctatttattattatttcaactccagccagttctcctttctagatcagaagacaaaccttttctactcttagatcagagaagaaagatcagtcctctcagccctgtagaggggaccttattcccaattcgagagtcagaaaatattcctggttggctcacactaaaagatcaggtagggcaggtaacatctcacttctgtgtaagtgaaaagcagatagcattactttaaagattttccagactagggtactttcaccatgttgcttacgttccagggacacattgattatctctcctcttctcatctattgactagtttggaaggctgtacgccagactcagtgtcccggggtttgaagagaagcaattagttaagcaactataaaatggaagattattccattgttatggggtggcttgaaagaaggctttagcatatgattgtaaggacatacaaactatgtctcctaaaaatataaaagggttttcgtttttccaagtgagtcctgtattatgattcagaattagatgtagcttctttggcaaaattcagtggctactgcttatagcgtatgttgggataggtatggattctttttttgctgaagggtcatttattcaattcttctaaaaatatttgttgagtacctagaatgtgtactctggatgtgcaaagatgaattagactagatcctgcccttcaggagaatacagcatagtaggcaaattatgacctaaacataagcgctataattcaaaataggcctcagaaagagaagaaagagcaggcacagtgctgtgttggtacaaagagcacacctggtgcacattaggactccactagttgtcacccatgtaaccttgggcaagttccttagcattcataaaatacctcataggattaaatgaaatcactcatgcagagcacccagcacaggggtgagtgctcagctggctcctccttctctcttctcttcagaaagggaggtcagttctgcttgggagagggtggggacttagtgtgttttttaattgagccttcaagaaggttgtgacatgaaagaagaaattcaaaaagtatggatgattgcagaaagaggagaacaagtaaaagaggaggacttttcatttcattggtgtcgaagggggcaaactaagacacttaatttggggagtcagctttgtagattaatgacagtagcaaaacaatagatatccacaccacaccagatctggaccagagttagaactggaatatatacatataggcatgtgtacatataatttcagggagccaggacagggattagcagatctggacagaccatgacattatgaaagaactgatcttatagctcctcactgggatgatgcagcaggttacagacattcttattcacatgtcctgtacatatcaccgtcctggtgcataccactgaaataaatgtttctgggtaaaatacttggatgaaagaattaatgggggaaacccaaggacactatagaaagttgtttttggaaaccaagagaatcaatattgccacccatagaaacagaggtgcaagaaatgtctctagtcattaaggagagaattgggatgggaatcaacagagaacagcttttcctaaggctctatttggaaagggttttggaaagaagccaattaagattattaagggaagctgtagttcccagaaagtaggctgaacagaacataaaaatgaagatgaagtttttcagaaaataaaaagggaaagaaaatctgtaaaaagaaataagggatgaaggtaaggtataaaacagtccacacacatgtaagaccagggagtggttagagttcaaggactgaggacagtggccttgcactggggacacataataaaaaccactggaaaatgggaagtgtacacaaaggtgttaacttacttcagacgggcagagtaacaactaaagattcctgaaaatgaacattttcagttggatatgtgagtatttctcttgaggatactatttctaaaaactttagattcaaaacaactcaatttgaatttttgtttcaatagccgagtacaaaattctttgtcctggaggggaaggtttccgaccaaatcctatcaccgttatattggaaggtaattgtgtttcctttgtcttaaagcacacacaacttgaatttccttgggtttatttacaatgctaaaggaatgcctttgttttgattttgatagatattgatgagtgccaggagctaccagggctgtgccaaggaggaaaatgtatcaacacctttgggagtttccagtgccgctgtccaaccggctactacctgaatgaagatacacgagtgtgtgatggtaaatggtcctggtaggatgataaggtcttgcagatatcaagaactgacctgcaaaaccagaatatggttactaggaaaatagaatttagcagtgtagcacaatgttctaaacacgaacatagccaggtagatatgtctcacatgtggcaatttggactaatgttactcaagtgatgtcatttctggtaagtcctaaatctccctcttttcctgagaaaaacagaatcttattctgctggaccatagcctcatttatgcttacaaaatatttttccatgctcttcagaaaagccattttttacatgaatggcacaggtccaatttcagtgttccttctctatttggaggagttctgggccctcttcttttaatccttcaccacttaccattggtgctcatgtattcaaataagcttctcctagaaggcggccctttggctttatgctatgagtggtggcccttgttcatcctgtgttactggaaaggtggagaatattaaccacttacaggtttcagagcacttcagccatgagccatggttttcatctacatggaggaatcacacaattgtttaggaaagagacctccttgtgctctgcataagaaatattcccctggctctttaatggcttattaggtcacccagacaatggcaaccttattgagtattagttgaacatcacagtgtatatggcacagctctaagacccatggagttaacaaagattagaatcaactccttcatttggaagtggggagaggatgtgaaatatgctccatgctgccttaccaatgcagattcatgaagccagctgttaatggcttcgggatactatataccctatcatagattttgtgagcataagaagcgtacttgtcttcctaagggatatttgatattttaatttctccacatttctatctctgcctacctttgaggatattataggttaatttattaggagactcattattatatttgataatgcctcatgtcagaaggcaagagttccttttcttttttgtttttgttttttgtttgtttgtttcgagacagagtcttgctctgttgcccaggctggagtgcaatggcatgatcttggctcactgcaacctctgcatgtagagttcaagcaattctcctgcctcagcctcccgagtagagtagctgggactacaggtgtgcaccaccacgcctggctaatttttgtatttttagtagagatggggtttcaccatgttggccaggctagtctggaactcctgacctcaagtgatccacccaccttggcctcccaaaatgctgggattacaggcatgagccgccatgcccagccaagagttccttttctaaaaccctctttcctcaaaaggcacacatttacacagagagaggacacggatgaatgaaatacctattttcgttatcttatttgaaaataccctatagattttctcctctaatgtcaacattcattaagtatcaggccattccaaaatgtgaagttttcatattcacataccactttctctttggattatagatgtgaatgaatgtgagactcctggaatctgtggtccagggacatgttacaacaccgttggcaactacacctgtatctgtcctccagactacatgcaagtgaatgggggaaataattgcatgggtaagtccaagcttttctcagtaatgcatgtttggttctcatctacaaagaggaagagagctcacaagttcatcaccttagggtgatgttactcatcagactgagtgctggcatcccttcactgtcttgttaggagactcttcccctataaatcataacttggcattttttcaccaccacgggtgggtggttgggagttttctctaaaatgtatgttggaaaatcccaaacaacagttaatagtacttcttttgtttgacttttgggtgtatctttgtacaattatatttacagtgctgacctacagtattaaaacatcacgagtcggaaacgagaaacttattgccaaatggcagtagggaattgttactaggagactgggcagagagtcatttaaagtttattaatgctacagctatataatgacttagttctgtggcatgaaatatcagggaatgtatttctcaaagtcctttatcttgtagcagcataggtagctagaaagttgtgtaagagcaagttttttgtgtccttatcaaagtcaagctacaatacaattcaaatgaaacttgcttgttgagtatccacttagaaatttgttgtgatttcccacatggcatcaccaaccctccaatccttttttttacctcccttctagatatgagaagaagtttgtgctacagaaactactatgctgacaaccagacctgtgatggagaattgttattcaacatgaccaagaagatgtgctgctgttcctacaacattggccgggcgtggaacaagccctgtgaacagtgtcccatcccaagtacaggtgagttttagtttctccattatcaaaaatataggttgaaaaattacccatgaattgttggggaaatcagtcttagcgaaggaagcaaagtgtgcattgtttatctttacagggaaaaaaacggctcatgatttaaattcacagttggtgctggtcattccagccgaacactgagtcacagaatatgttttctaatgtataccctaatacgtaaccagacttgtagactcagcatatcacaaaaatataaactataaacaatgttctcattgttactgaattcttcatgtatctaaaagactgtaaacattagacaaatcaatgtgacagtaagggaaacataattccttgtctttttacttatttaaagctaaacttgttccaaaaatagttaaaggcagcctacaaagatgtaaatgttaaacaagaaataagcataaggcaaatggcaaacaagaataagaaagagccaggagcaggactaatacacaaaattcaagccgggaattctacacacttgcctgaaataagcaataattttagccccaaactttctagcagctcctatgaaaagggagatgtgatcaagtacaaaattctcaatgagcataaagaaaactcaaaatgaaaggaaagtgcaacttttcttgatattgagatcgagataaatttcttcttatattctcatggagaaagaaactaaataatgttatttgtcttaaaaaaaaaaggctaaattgcatcctttgaataaataaagacattagtgtactgttcttatatcatatggtatatgctgtgcattatgtatatgatgatgacatcatttgccaagattatgatttgggttagttgaaattatcatgcaaggaattgattagggtattctataaagggaatcctacaccattttccacagtgatatataaaatattaaatctgttgtttggtactacctgacattgcatgcaacagaaaattgttttttagtaaaatgtattattccatccattgtttactccagaaataatataataaccaccacttagaattctgatttacctccaccctgcaaaatgtttctagaccagggcttggcaaaatacaccccatgggccaaatctgtcccaccatctacttttgaatggcctgcaagctaagaaggatttctacattttaaatggttggaaaaaatcaggagaatcgtatttcataatatgaaagttacatgaacttcagattttgtttcccataaataaaacttttttagagctcactaatttatttccatattgtctactactgctttcatggcaacattaaatagttttgactgactgtacagcctgcaaagcctaagatatttactctctgtccctttattaaaaagtttgctgacccttgatcttgaataatggtctttacaactttaggtggtacttacctgttggtaaaaaatctgaagcttatgcacacctggtgtgcatttatatgtaaaagtctatgtatatatatctatgtatgtgtatatgtatttgttttcaattatattgaaaaatacatttattatttttctgagctgttctaatataaagtgtacacaaaattaatttttttaaagattagatttttccaaagatagatagaagtcctcgcattttcttttttatcctaatggattattgcatattcctctggagaccactttggaaacccttaatgtagactaacatttacttttagaaatgattgcctgagttttgaatatctacatactcttgtgtaaaatgcaagatttcttcttgatgttggatattcaccaaattcagtcatggcttttcattagctgtgaaatctgcacatattttaagagtccctgtaatttctttaggtgaccaatgtcagctggcgttacagtgttggaagtgaacactcatagattaaggagacaaaacacaaggagaataacatgctgtattttgattaaaatacttccagaaatcttttactgattttcactgagcgtgaccaataaggcaatggccatctgaagcttagattgataccataccttaccagttacagtcatgatctggaatcacaaaatctcacagttagaagggactgctgatagaatttagttcatcctttattatctgttaaatttgactaattcaagtgagagaaagacagagagagacagaaaaggagagagggagagggagagaatatgacagagctgtaccaaatgaaatccagctccaaaaactgaaaaactggtgaaggttggttgattgacccaaattagtcattaatagatctgatgtcaagaatgtggctagatttgctatggtctcctataatctaccgagaaaatggcttttatacgtgttcctcaaaccctagatctctaaatgcagagtagagagaggcactcttaccagtccctgagttcagagctgaataacatccatattgaaatccaaactcctacaggtaaactcatgtgaatgagtggcatgtgatctggggatctctacttctccttcattatcacgtcaacattaggtcatttttttcttcaatatttgtcttacaggcaagattatatctgtaggaattttcaggtttactttttattttaaattcttcaaactacagacaaatacctttcaagaatgcttacaaaataatttttttcagtccaattattgttctttgctgacccctatcctcccatcccacctttgtttaatcattgcagatgagtttgctacactctgtggaagtcaaaggccaggctttgtcatcgacatttataccggtttacccgttggtgagtcatgacggcattgtcagaactttctggttttttgcctttgtgttagcattattttttcagttcccatttttttcttaaaggaaaaaaaatattaaacaatgcctttcactttattgaaacactgattcttagtttgaaacaaactgtgcaaacaccctgtgcagctccacctaattggcaacaacatttgttgttcatgattaaggggattggaaagcttttcccaaaattacaatcaagcatagttacaccaaccttaggcatcaacatggggagagattctgggagtggggccagttgacatttgatttaactgtaattctcaatccttccttctgactaagaccaggttaagtgacttcacaccaatccttacgtgtagattgtttacataaagtcctttcgtggatcaattttatcttacatggaatctcctcaggtcatctgctttgggaatttcagatgtgaaataaaaatcttttcggtctgaggccctgcctggtaaatgaagcagagaacacaacattgggagagatgcttgtgcaagaatcagaagtattacacagcactcagccagtgcaggcaatgcccttgtggtttaaaaccaaataacataaaagtagatggaaagctattgcattctctgagtttttccctggtgtgatttatatgcatccttagatgccctcttaagtctgcacagttgtgtctagtagcaaacatcaccacttgctttattccaccttattcataataagtaaactaaaatccacatcagcctttccagtgaccttgtttaagaaaacaagagtctggtccagcaatcagcctggctcccttagtgccaaatccatatggctccacagtctcgtccacgtccaaagaaacttcatggtttggaaagaaaaactgctaaatgacattggcatggaacacctggccctagctgctttgtttttccccttcccaaaacagatcttttaacctccctagaatctgtgatcacaagataagtggtctgtaatggtagtggttctccacggaccaaccaggcatgtaccccagcaaggctgccctccaagtttggcagtaagcaaagactagaaagaacattagcgttgtccactaggagagctggaaaggcttcagacttcatctagtccaaatgccttgcttcatatttgaggagacagaggcccagagaggggaagggactcacccaaggccacccagctaattaataacagagctgggaccagaacacagtcctgactcatggcttagtttgcttctagctcttgaaaactggacatctgttatttagctatatgcttattgttaccaaattccagcatgacaaaatatttagatgactgaaaaactttgttttatttaagctttatactctccttttggaagatcttatgattgttggcatgtggagtccattcatatagggttaaaactatagcatgtttatcaatcttgtcttaaaatataaacttcactaagttgaagttcaaataaaatcctgacaggaaaagaaaatataatttttaatatatccttttgctattttatacctaacaatggctggaaattagactcagcccgttattgttaaacttgataataatatatcacttatatttaaaacgaatgtgaatatgatgtttcgtgttctaacccacactgaatgaatggcatctgaatttgttttttgtttacttatgatacacagttgtgatgtaactttatatggcattttcatgacatgaatgacaaaggtgtgaaagatctaaagacataattgcgtgtattcaaaatagcaatgaaccctttgagattctaagctgtttcttttcattaaataggtcaattttgccttcacacaaaatcaagcccttttttaaaaagggtctaaaataaatctatgacatcaaatttctcctttaaaacagattggttatagagtgtggttcttctaaaattgcagcagctcttgtaggctccacttcagtccgtgatcatcttctcacaagtatgcaagcaaagtatgtaccttgcaaaggctcctgactataataagtaaacaacgtatctcaacaacagtcatagaaactagtgaattggaagactttggattgtagaccaaggctttgcatacctcccagctgaggtgtttcatcaaacccagccaaggggctgatggaagggccctccaggataacaaaagtgttgatgacagttctgtgaagattgtattagggtgatgcaggaaatcaccataatacgatcttcccttatatgataagggaggcaggatggcctgttaactgagtcccagtgtcaaatcctgactctgcctttcattggctgcttggtcttgggcaggttatatcctgtggcttggcctcacttgcttcatctcttagttagaatagtcatagtaccgagaccatctcatggggtggctgtgataattcagccaataaatacaggttgaatgcttgagaaatgtaccagtcatgcagcaaatgagatactgtcactattaatactattaccattattactactattactactcttatcctagagggcacttcagtggtcaggagttcagagtgggtaagacagagatgggaccactccaggctggggacatggccaagctggtgaggtgtccaaagtctctatccatagctggccagccctgccttagcagcctggatcctggctgtgttctcactcttggtcctgttttagtgctcaccaacacactgccagacacttgctcttaactgaacaaatttgaattgagcacttactacctgtcatgtagagtgctaaggaaccataacacagtgttggagagccaagcccaactcccagtcttaggaagcacacattctactgcgacagttcttccttggtgctgacctcgtttttattgtcagccccagcccagctgacatccccacacctgacttacctcctttctaaagccacatgaagtaggaagggggagttaaactggaatttgaaagatcagagttccatatgaccatgtgctcctctgtggttctttaccagctcacctctgcctttttccctaaatataggcacacttgggtggagaggctgtttacccttgaccatccctctattctactcatctggtgcatccacagtgcccagaggatacaaagatatctcctacctgtacaaaattgacattctgaagcaaaacccagaacatatatttaaatccagttagactcatgtctggaaagtggtttagttatctcaatttgctattcgttgatgtccctattgccatcaccaccaccccaacacatgcacgcacacacacacacacacacacacacacacgcacgcactttccatcttgtcttaccctgcacagggatcatgtgctgtcctgtcactcatgaatgactactctgtctctagatattgatgagtgccgggagatcccaggggtctgtgaaaatggagtgtgtatcaacatggttggcagcttccgatgtgaatgtccagtgggattcttctataatgacaagttgttggtttgtgaaggtaagtggcatcatgactttatcatatccagaaaagagctaactgatgagctacttgatacacacttggcgaatttcacaacattgaaatttcagaaatgcattaagctctagaaatagtaaagggcatggtgtggaacaacatgaaatttcatgcaaaaaaaaaaaattcactaacttcagtggaaaaaccaggaggcacattcccagcccctttcccccaacacacagtgtgttaatattagacttcccagctgatatgaaaaagctttgagttcctgggtgtgtcacatagattgctttcgtttcacattgctggaaaatcagtatgagtggacagtcatcctagttgactctcaaaatcatttctcttccagacagagactttgctactcccaagtgaaaacaaggttaatgcagatattccaaatgcatgagagaattccaaatggcaagaacagcaaatttgattttatatgaagaatgttggcatgcacatgtacttttttcattttcaaattacctcctgttgccatgtatatgtactgtgattcggagcattccttatagcacttcatattttttcctgcatctgggaaagatagttctcttacattttagtaaaagggacattactggttattaaatataccatgtgcccaggatagttggaataattttctatttaatacttacacttcaggcctctagcagaatttttattcatgttagaaagggttattaccccttagagcacgtattatagcacatatgtcaacattttaatgttaaaaaaaaaacttttttgtctatactgaagacaacttatataccacaagtaaagttatagtcctaaccacatacttgttaagttcctgtcaccaggctttcagttactgtgtccaagtgggcacatgtcccttactctgcctgctgtgtgagttagtgggaatggggtaatagcccttccgagccttcctaagaagatagccagttcagaccttggcccaagtccctgggctctgggaagccatcaaggatcaggtacctggagaggaagcatggatgtgggagagggaacccacggcagatgatcttacagtgctagagttggctgcctccctcacagccgcacttttccccctctcaaacatgctcagcatgcctgccacctgcctgtggcattttcctccccacccttcccctcagagatggctttgatgatgactgtacccaggtaccttttaaccacttatatttgctgaagctgcaggccttggccagaacccatagacaagaccacccatgaccaccaagtcaacttagaccttgctagatccatgagattaaacacatgcaactgtaccaatgcaaggcattttgctgtcagggtagcattctgtggatattgagataactaagtgctccaacttctgatttccatttcacagaatatccgtcttcagggtgaatgtttaatccagggtcagctgcttcctagcatactcttagctcttagaataggaaaatgaaggttgagtgcatacatgcctcagcaatgctgaaattggaatggattgtagaggtgatttagggagcttccacgcctctgctcttgccaagtagccacattatcagatgccacatcatagaagtgcttctctgtgacactactcagtttctccagtggcgcaatctgccccctgtgtttctatacatcctgaatacaaagcagggcagacctggtgagtgaggtggtgctgggtcccttgtaacccaaggcagacacactcctgctcctgtgtctgttgcccagagaggcacaatccacctgccttagacaggaacccccactgactgactgacagtcctgagggttttccaccacagaatcacgcccaagaggcatcggctgatgtatttgccacccccttgtaggaacttctttggtcgagccaacttctgtgtaaaagcccagaactggtactaagggccaaccttcacctgtgttataggccatcccctttattggacttagtctgtaaattagattgttccactggagcagggaagagggaaacatgtattttgccccatgatatagcatggacatgtagtaacttttgtgatgccatgaatttgaactatattagtatctgttttttgttgttgttgtttgttgttgttgttttgttttgtagacagacaaccccctaagcaaagtcaaaactctggaacacacaatatccattatccaaaatcttttctgttttaatgagagttggtttgttttcagtagttttatgataactcccatgttaggttttcttgatttgattgccttgtggtagtaatttgagcaggtgtctttacagccctgtacctcaaagcactctctacagaccaggagcacctgcatcagctgggaacttattagaaattcagactctcaggccattttccagacatgccaagtcagaatctgcattttagcaagatcccaagtgattcatgtggactttaagatttgagacattctgctcttgcagcctttcagacaatagcaaccttattgaatcataaaatccagatctttgagtaaatacaaggcttcctaggatattaatctatacccatgtcaagtgctggccctagcagccaagtttcatgacttttttttagatgtgagcatcattagagtccatatgtggtcataaatcaagccttgcatttataaatattactaagtgggaaagtttagataatggactttcggtcttcctttctttctttcttttttttttaatagactttattttctagtgcagttttaggtccacagcgatattgagaagaaggcacaaagatttatcatatattccctacccctacacatgcacagcctcccccatcatcagcatcctccatcagagtggtgcatttgttacaattgaatctccgttgacatcattatcactcagagtccactctgatgatttacattagagctcgctcttggtgttgtacattctatgggtttggaaaaatttataatgacatgtatccaccattccataactattcatagaataatctcattgccctaaaaattctctgtgctttgcctgtgtatcccctaatctcccctaacccctggcaaccactgattttttactgtctccagagttttgccttttccagaatgttatatggttggaatcatacattatgtcgcctttccagattggcttctgattcgcttagtaatatacatttaattttcttttttcttctttttctttttcctttttttttcctttttttttgtgtgtgttttttttttgtttgttttattttttgtttgtttgtttgtttgttttggacttggagttttgcacttgttgcccaggctggaatgcaatggcatgatcttggctcgctgctacctccatctcccaggctcaaacggttctcctgccccagcttcccaagtagctgggattgcaggtgcccgccaccatgcccagctaactttgtatttttagtagagacggggtttcaccatgttggtcaggctggtctcaaactcctgacctcaggtgatccgcccgccttagcttcccaaagtgctaggattacaggtgtgagcaaccgcacctggccatatttaattttcttccatgtcttttcatggcttgatagctcatttctttttagtgctaagtaacattccattgtctgaatgtaccacagtttatttgttaattcacctatcgaaggacatcttggttgcttccaaattctggcaataaataaagctgctgtacacatctatgttgtcttttcaatagaacagatcaaaataaaatataaatttgttttcatgtgagaggctttgttgactggacaccagattctgttctccttcaaattcagttctcttctgctcgtagatattgacgagtgtcagaacggcccagtgtgccagcgcaacgccgaatgcatcaacactgcaggcagctaccgctgtgactgtaagcccggctaccgcttcacctccacaggacagtgcaatggtatgtagtgccccacaggctggacatgcctacccaagagtttgtcttcatgaagcttcagatatctggatttattttcagatagttaagctgaagaatatatgagttaagatttagattgatgaactctaatattaaactaaattggaaaaagggatattgtcaaaatatctaaacacttagctttttaatcctctttctggatgagatattttcaaaacaagaagtaaatcattcgcatacatagatttcgtatttgcctgtctgctgccctgcctgcaaacactcacccccacacattacacacacacacaattatgcatacacacattcccctaagcaacatttaggaccaaatgatttttttccttccacagaatccctctcagaaaggtgaggttttcaccatcttggctgcataccccaaatctagacagtgaagctctcctgagctgggtcagattaatctgcagaaacagaacaaacaaagccatcgcttttcttcccagtcatcttacagggaaagggtcactcactgaaggcagcaaacatcaacagcctttattagctatttattcccatgacccctagagattagatttttttggtgttcacttttgtcagggatgtgatagaaataggaagcacgttggcatgttatcaacttcagtgtacggtgaagttattcagtatctgatggtatcttgtagccagtggtgtgaaaatttaaaagactgctgtttcagcccagaaacaaaataatatctcagaatgattttcttgtaagtttttaagtaattctgaatctgtatatttagcaaaaatcactgtatatttagcaaagcaaatcattgtatattagtcaggaagaatgtgttattttgctcacggttcatttcacggggggtttcctggatattttatgcatttgtgaatgaaacaacacaggggaacgtggtcagattttccttggatttccttgcctaccagtgattaagtggtaggaagtgcactgttctctttagggtattttgcattgttttatgagaccttggtgggaagagggtgtaattgccaaacaaaaaaatcgcattgagaatcaagacttgttttgttgagtttaaaggaaaatgtgtaagtatttagcattttgtcaacagagctgttgctatccatgtattaaaaatacaggacaggaaaagcagggacgtctctgatatgaaccacaataccctagagaaacttggcattgataccacttccctgcattttgctcataatttatatttctttagaactggatgaaataattccagtcaaaataaagaattgctgataatatagaatgagtcatttcacaccatttcacactcaggtaagaagtgggacagagctatttatagatcaagataagacattcagccatagcctgctggagcttaagtcatttactgttttcttgtaggagactatcatacataaaatgcagccagccataagtgttgtgagtgagcatcatttgcagccaaaagcttgatttcctttattcattgaaatcctcagaagaaagggaattaacttgagttttgcaaccattcagcctgttgggttgaagacctcattctagaaatgtctttatttatgtcttacttttaaaatatctttaaatgctattctatacttggcattttttttttcaggcatgctgcaaagtactcctttgtgcatctgtttaaaatgaaaataactaaaactttctctccatcatgagatccttatttgaattcataagcacattatttcaaatcccaaatcacacctggccatagcacccacattattgctgagagagctgagagaataattagatatctgagctcaggatgctagtctgacagcagaagctggatagttagaacaaatgcaacccccttctgaaatgtcttgccccacaaaagacaaggaacagtttcttcccagctacttccttgtggtttcctctctttctctgttgactatttgggtttctttccacagtagcctgttcagacctcctatcccaacctcaaatatgatcatctaagagttcaaattctggtgcttgtggaaacctagatttctgctctagttttaccagtagaactccaaagtactccccatgtttcatttttcatttatttaaaccatcatgaaatagggcagtagatgaaaggaaattcctaattggggatccctttctaataagatccttaaggctctccatttccttgtggaactcagatatgagacagacctcgtcccctgcatacctccaggtccagtcctacctgaaggtgccaaagttttgggccaactatggtaggacctgagacacccttcctcaagatcggaaatcagtctcctctgcctatactgggaagcagttggctcactttaaattcattttctcaaaagggaataatcataatttgttaaatagcatttctgcataggctagtagtagttcctaagctgctctatttcaatttcccctcataatgatatactccacttcacttggaacttctaaatggtatgatgattcatctactaaataggagataaccataacagtggcatcccggacacatgaaatggaggagatgtccatgattctggcacagggagggttgctgtgtgcagcaaaaagtgtccattcatgattactgtgttctgagtagacattgcaggcaaacggcaagtctggattatttaactaagagcgaaatgccatctgccctacagcatctgcagcaaagatgacactccatttgctttcttctgtgacagtaggaaaatcagaatggcacagtgctcttcaaagtacatttactctaaacatagagctttaaaaaattagagacgtaagttggcatataattatgtcatatgtgaattcatgcattaaattctgcccctcagataatcagatttcaggaaagcaacaaagattcagttgatgataaatataatttagaacttaaagactggcagaagcaagatgagagggcttccttttgaatggatgagagtaaaaagaaagagacagtgttcaggttgtcacatgctaaaaggagccctgtgtagacgtgaatacttggtgaagatggaacaaaaagttacaggcataagacaaaacaaagagatgcaacttgaacaagcagccatgtaggttgtccatcaagaaaaacttaatcttagtcataggatttgactttgatataaatttacaaaggaagccatgaactatccatgacttaaggcaccaaatcttaactagacaaaatacttcaattaattccacagtctgtggtgctgcgtaggccgataatcaaacagaaaatcctcccggcttgaatccccccattttacttctaagttttctcatctttcagaatattttttgattacttacccttattttttattgtgtcaagtattgttaacatactctgactatgcctggtaaatgagagtaagttttaatccattttgatgcaaaaataaatatatctgtttcactaacttagtttagagctaggattactcctgagaatgatagctagaagtaagttattcaattatattttgtcttctaagttctcacttaagatgcttcttatttacagatcgtaatgaatgtcaagaaatccccaatatatgcagtcatgggcagtgcattgacacagttggaagcttttattgcctttgccacactggttttaaaacaaatgatgaccaaaccatgtgcttgggtaagtatgcaattattattatttttttcatatgctgttgaaagcttcatttgattctaaatatggataaaatttaatactaagtcttttagtagtatttttgctatatacaaaataaaaacacagacagatatgcagcagtgatatcctatttaatctttggcaatctgaacatgataaacctcttcctttgttattcatttggctgtcagtttagaaaaaattgactaaggggtaaattgaaaaagatattaatacaaaaatattaatgttaataggctattattcatatgtaatattgatgtggattttcttttgagtttttgagtgtgagatgaccatttttttggaagggtttatagtgtgtaccagattctcaaaggcaaatttataaatcctacaaaggcaaagaaaagttaatcatttttctagaggaaaaagagctcaggattttaaatctctttcctgatttctctattatcaggatgctgatttagaataaacttcagtgtgtaatgaatcattttcttcttttccttcctttatttttctactttaaagcaataccattaagtctttttgggacattaagaacataaatcagattcacagctgaaagaacaattaatatagtaatgtttaagtccttgactttggctatgactgggttcatccatttgggaacatttctcataaagttgtatcttctccagagtaatgacaagagcactgacagccctactcatcactgggcagctaacctgtgtaaaagctatgatgatcctgcccaactttctttctacatctctcatctgaattttctggagccccctaacatagaaccttcccaaccaaagaacttcaccagtttggctaaaaatgaatcaaggcaaaaattcttgattactagcaatgactcatctgggtgtagtcttcaaccacagacacacattagagtccctttgggttagcaatagcttcctgattcaggaatcacagatcatttatcttcatgtccaaaatgtgaaaagaaagggaatcctagctctaatcattacattttgctattctccgttgttaccttccactctctctctctctcatttcatccttgtccctcttcatggtgcctcattctttcaaaccagcagtaacaactttctttcattaaattttttattacttcctccttaatataatgtgcatctactctttataagaaatatgctagctgctgtgatgagatgcaaagacatataagatgtcagagtagctttacaaaatcatcagagaaaagtacggaccaatcaaaaggcgaataagaatgcaagcatgtatgaaaagaacaaattaagtgccatctctttggggtagtttagaaaagtgagagaagtcatcattggtggaagttgttctatgtttttatgggtgtagggaaaaaggaaaagttgtctgaaatgacaggtgagctagaaagctgagttattttgttgctgattgtggggtaatgccaggtgagtcactgctttttggtaaactggagtgagaatcttgaaggttgaagtttgccaaaggtggcaacacctcaagacccagatgcacacagagttttttccattttcaagtgaaaatatttgagaaaagtggcaagggtggagaattctagaagtaaatagaataaaataattcttgttcaggtctcatgtccttagcttgcctcctttcactggccagccaaggaaaccatttattcccaagatttagagctttgccgctgcctggtatcttgcagggatgactgctgctggagctgataccaacatcaagaagttctcagcctatggatgaggcctggtgaaccctaaaatgctctttagccactgtaaccgtgtaaccactttttctacttataattatgtttctttatggcctttcttcctactagacataaatgaatgtgaaagagatgcctgtgggaatggaacttgccggaacacaattggttccttcaactgccgctgcaatcatggtttcatcctttctcacaacaatgactgtataggtgcgtgtgcaaaattgtgcatcagcaaaggaagtcagttttatatgtgttctttgtaattagcatcatctctagtgttccagctgtcttttaaaaatgtatgctatcttatgcataacaattggttatgggacttgtcaaatacaatgtgctcaacatgaaatatattacagaagtctccccttatccgtgagggatacattctgagacccccagcagatgcctgaaaccacagatagtactgaaccctctatataccatgttttttcctacacatacatacctaaagtttaatttataaattaggcatggtaatagattaacatcaataactaataagaaaatagaacaattataacagtatactgtaataaaagttatatgactgtactttcttgtgcactgtctctctctctctcaaaatattttattgtactatactcacctatttttgggtagcagctgaccttggataactgaacccccagaaagcaaaaccatagataagagggaaccactgtaactatatccattacttttattaaaatgcttattagcagctataatttttatgtctactttgctgtaaattaaataaatttcaaaataaatggaattagattaagccaaaaaatttttaaatatacaaaagtgattctttgtatagaaattatatgattcaggactatgaaccttctggtctagatgtttcatgtagcctctcttaaataaatcattgaatctacagaatctccttctaaaacatactaggcaagagtaataagccaaattctttaaattttattgtgctataggctaatttaaatctaattgcaagaatacaaaggaatgcccttagctgaattgtgtattaggattttattttttaaatcaaaaaatttttaaatctaaaatttaaaaataaaatctaaaggaaaatcaaggaaaaactgataggaaatttgaatgtaaattgtcagtctctaatataataatgtaatcttattgttaaatgtgtataggtgcttaaagccagttctgttgttgcaaactagatcttcattggcatttcttgtttggctaagccagcaaaggccactaaaattcagaaaaagtattttttcttttagaagttttgattattgctgggattatgacatctttggaatatattaaaggattgttggggatttttctgcagatgttgatgaatgtgcaagtggaaatgggaatctttgcagaaatggccaatgcattaatacagtggggtctttccagtgccagtgcaatgaaggctatgaggtggctccagatgggaggacctgtgtgggtaagtacaggacttagaaagacctggaaagaatgcttccagagaccactcaaggaatcatgcagtctctgttctaatgcttctttctggaaacctggaggaaaagtcagagtagaattatattaatcctccctataaaggcttgtttttatttaagtatatatacacatatatatatgtatatatatatacatatatatatgtgtgtatatatatatgtatatatatatgtgtgtgtgtatatatatatatgtgtatatatatatataatcactttttcccttattttaaaaattaagctattgtactcaccaagaatactcaaactattaaacagtgaaattgctaaattgctctgtaagcaattgtgatttcccttcttaaatatttttctttaaaatacttttgtagtaagctctcatatcttttgagtatccttaaaatctatatactcactgacttttcacatgctacaattttctggaaacatttaatttgatgcaggtaaaataaaatatggttgttatgctatacatttttgaaagctgataaagcttatttttattattgcttatttttctccatggtggaattttatgaactttaatttgctttatgtatttctttgattcattctagtttttttgaattttaattgtttgatggaagtcatgccagtgggaacctcttccttatttttcccttttctttgcagatatcaatgaatgtcttctagaacccagaaaatgtgcaccaggtacctgtcaaaacttggatgggtcctacagatgcatttgcccacctggatacagtcttcaaaatgagaagtgtgaaggtaggaaagctatcagttgtagcaaatgaggagtgtcgggtgtccactggacttagcagaatgagaatttttgtaatgacgtcttcattttggaatactttatcagaaacaaatgcaagggcataggtatgacatggtctcatccttctggcaagacaagaagcactaattatcatgctaatctctaatgaagttattttgttctgtgcatatgactgatcatatgatcctgactcttttccactgtgctttcacacatttgttaggaatgctgtgtcctactcccagtatttccgaactacattttttaagtggcgattctttgcagctaaaaatagctcctgattccatttaaaaactttaaatgaccacattcaaggttggatgaatgtggttatatcgtttgtctattttgtttttacctatagagcagtggaaatgtcttatttcaaataaattctcagcaaattttacagtattacattcctttttgtttgtttgtttttaatggagacagggtcttactctgtcaccaggttgaagtacagtggcacgagtatagctcactgtaagcttgaactcctgggctcaagtgatcatcctgtctcagcctctggagtagctgggactacaggcatgtgccaccatgcctggctgattttttaattctttgtagagatggggcctccctatgttgccaggctggcctcaaactcctggcctcaaatgatcctccttcctcagcctcccaagggccttcctttaacctcaacaaatatgtcatatcattaagtgaaggacattaattgctagaatttcataaataagtagggttgaaaggattttcaagaagtcacctagttcacacccctgactttaaacaggtctgcatctaatccacaatgagaattttctctacttttaatatcgtcaattagaaattttattatatatccaatttaagtaacaatcaagtggtgatatttaaaatggaaacaccttattgaaattgtctagatgcaaattttttaagcatgttattttacttttattaaaaattggctttattatcaatacataagttcgctaaattgaacagaatatatatagaaagaaaaataactgcacagtcaatgaatgtgcccattctacaatatttggccctatcctaataagttggcatgtacaggctaatttctaccataatataaatagtcatagtaataattaaaaacaactgaaaacatttgagcattttcacaaaagttaacttttatattaagaaaaggttggatataggggtggaaggagtgtcagaatggagtaattcaatcggcaatagaagatcagattcattaataaaccacagggaacataacacaggtataaatgcaacccaataacatggcatgatggagaagctgattttgcgttgcacagaaagagaatcacttggcattgcacatttctagaatatttattgtgtggtatttacaatattaagtcaagataataaggttaatttctcaacttttccttagttgggcctcttgagaataaagttgtataatgcaagtacattttggtgtgagtagaaacctttgcacaaatataaaaataaagagcccaggatacaaggatattttgtgttttgttgaaaaaataaaaaagtattctcataaaagtagcatggctcagaattaagacttaccactttgttcactaaaaattcctgctgaaagtcaggaggaaagataagtgagtttgttggaatagagtgggcatatttttccataggtaatcgtatgttttattgaccaacccaagccaattttgaaagtagaaaagggcactattaacaataaagtcaggccaactggcatgagctggggctcccccaggcaaactaggacatatggttactcaagccattcaaacttcttattggctactcttaactaccactgtacaggagctaagatgtataatatactaaagaaaacatgccacaattctaagtgtacagtttcctattgtctatatgatgaaagaaaaagcctgtacaagaaaggtatttttgtgtcttcagaaagattaacccacaaatcaggagcgtcatcttctatgatatcgttagtttgcacttcataggattatacttattttcatgagtcttagtgttcttgtaaaattcacagttttagggctatagcatagggtattgggaaaagttctgtgggtggttggaggggagtaaatttggatcaaaggcctagatctcacattgagtgagtcactagcaatgtgcttaaagtctcagcatttctgcttcctgaacaatggtgcagtgtgactctagaatttcatgcttctttcctggcctagggtactatgaaattactctgacttttctagttagccaagcaactcagtctgggtaagagacgtttgtcactgcaccccttagaaggcagttgcacattccatttttatatcaataactgtcaaaactaattcttttgaagtcatgacaacctagaagtccagtccacagtgttatggtacagaaaaatacctttattattgtaagagtttggaaactcagttgccctttgtgtgtccacattgtgtgtttggtacctgatgatgtctccatcgtgttttgactttgtttgactcatgtgattcttttagatattgatgagtgtgtcgaagagccagaaatttgtgccctgggcacatgcagtaacactgaaggcagcttcaaatgtctgtgtccagaagggttttccttgtcctccagtggaagaaggtgccaaggtaagtgtctttgaaggctttgggctttcaatgctgcatgtttatttgtggtggtcttatttttcaaacatggcaaagctctgtttctttgtgaacaggaagatggagagttttcattcacccagaggtctaatgataaccatatgtcagaaggttcattttcacttttaaggttaaaaactcatccatcaagttatggttgcttatacaattgtactgacacataaacctctctcccactaagaacacaaatgctgataggcccatcagtggggaaacaccttgagccaccgaaacagcaaagcctgggggaagttgagctacatatcccctacctctgaagagataagctgaaaaatgtgggtccaaagttagacttgagactgaaaaactgcacattaacccatttgcccccacaatatggtaaccatcccttatatcacaaattctccaagaaaacaaaaataaatttaaactgatcaggattcttgctgggccattgttcatttttaggaataatacttgtcaactatttgagtaaagattttcaagggtttgccaatgactttcaaattttaaacaaaaatcaaaaggatcctgaactttggcataacacagtatgtacttaagtcccagaaaactgtttagacttttctaaacaatacagttgtgtatggatatctacatacacaaactagtttcatgaattccggggaagggagatgaaacaaacacatgtatttcttttttttccacttgtagcttttgttgtttggttgttactgttgttttgatgttgagttgggttttttttttttttcatggttttttggttttgcttccgtattaccaaatatggaagaggcactggatatcatttaaggttcaaaaaattgagtttggggtcccagccctgccatatttagtctagagcaagtcatttaatcttttggaagctcaatttcctcattttaaacaacaataatatctgcccaaccagccttactgtgacaaagctttgttagtttctgagtcctttgtagactcttgttgttattctaatgatctgattaactttttacttttcaactagttatttgggaagtaagaaggagagggttgagagttctccggttgatttcagcttgttggtagttgtcagtggtctgtgtggatttcagggtggtgcttaattcgaacagatattctgcatggtacagaccagtcagataaattctaactcctactcccttgtttttgtgtgcctttggcttggcctgaatttggaaagaaagcagtgagaaaccaggtgtgaatctgccgatgtggcaggccagaggaaactcctaggctattaattcaatttgcactggcccatcacagagcaagctaacgctgcaggaagaatcagcccagctgtgagcagccctgccacatgctcagctccaggaggcagagccagaactgaggaatgcaagcagggaaagtgacttttgtagttctgatgaaatttcgaggtcattaagggctctttgcagatggactggtaaacaggcatcccagtgagtcctgaagtatgtgggcaagcacagctctcttccccaatgcaagacacccttgattaataagccaattctagagaatcaccacaagctaaagtaagtctcctacagagcacagattttgctggagccaggaaattgagagctgggtttttcttgtaagatgacaaattaggagtcagacttctattgctcatgaaatgagaaaattccacagaaccgtggataatgttttttaaaaagcgaatgccatgggactcaggtggacagagcctggcacaaaagaccacaggtgtaaatgagccactcccacttgcaaagttcaacgaagagaatttgccacttagactgactcaagacttcgtgcatttgagtctctgtctaatgccaagatttttttttttcggggtggagtggtgtgggggagatagagctggggtctgggacgaagtcagctattaaaggaaaagagaatgagaattttaatacaccaatattacaacatacatatttaaagaaacactacaaactggaagacaaagcagagttaagttttcatatatttgttgagacatttttgtgagtagtcactgaattatatctaaaggtagttggaggcataaataacaaaaacaagactgataaatacaaaacattatatgtgacaaagaacttgaagaataaaagagatcaaaagtgttctccaagaaacaagaatttgttcagtcttgaagtttctcagcaaagcaaacatttgggtggcagagatgccgcaggattgacttttattgctcttgaccttcagaaggataattcattgaaaggtgcttgccaggtccttgccacaacagatggggaagtggaatagaaattagagagatgatttatctggatgagttggtagccatgaaaggttgagcaggtttactggggaggctacctgaatttgatttacataacttggtaaatataatagatagatagatagaaactttaattcatgaaaacctttcctttgttatctctggcaactctgttattcctacattgtcttctttgtcatgaaataaaagctggtgagactgtcttaacagaagtgcttaggtggttatgatagtatggttcctgggattgaaaaacagtgatggaagtgaatgaaaaaggcagaggtggtcagatataaagaaagaagaatagtacaatatgggtatgaaagcatttcttttaaacctgcagattgtggcctctgtgtaatgagaggagttttggaaggctttaagaagtcaagttcgagggaaaacacagtccatacctctggttgagctcactttttggagtcaatgtgttgtatgagaaatggaaaagcccgtttccaaaattatgtcaagcaatgttggagaattttataggaagtagatcccatcttctttgttggagtcatcaaagcaataatcaatattgaaatatattctttcaaagaaagactattctgttcccacccacccacagccctgccctcctcttccttccctctctgtgttgagctaaacaagcttcttttaaaaatttaacattgacacagctctgcatatgtgtgtgtgtgtaaaatctacaaaaagccccacttgcattttgtagccagcatctccgggagtatctgcttcagtgaccaacccttgtgttgtatttttgcccatctacaaagttgccacttctgtatttgttctgtgcctgtgatctgggattttattttagttccagagtttaggggacacagaataaaccacaaagtgtgatatcacagtaaatattagaactaagaggattctcttactctagtgtgctcattaaacatgatattgcaagcagagctatcaatgaaggaatcttgtgaatgattccttctgtggactttccaatcctgaagtcactgacagatgtcagttttgaaaactgtcagttttggattttattggattcacatcgggttactttgaaatagtgactaaaatgagaagtaataaatttaagttcatagagttgttcatcagatctcactatacaaaagatacccatgactttaacaatctcagctcagttaccattagaatcacgtaaggagtattgctgtggtcctgagaggagaacatatataacatagtgggttgttctttatttgctatggtgcaatacggactcagtaggaaagcaactgaagggtgtcataaatttatgctgcagatttgcgaatgagctactgttatgcgaagtttgaaggaggaaagtgttcatcacccaaatccagaaatcactccaagcaggaatgctgctgtgccttgaagggagaaggctggggagacccctgcgagctctgccccacggaacctgatggtatgtctgtcatctgcatttctctctgggccatgcagggtgcagactggccatgatgtaagtaagactgtaggccttaaagacagtaacacaatttaatttaattgtaagtctaattagaatgttcattaaaaattattttatctcaggagcttggtagttattttctttttaattatgtcatgaatcacagatgcccaaggagtagacacaacatcttagggagtctcgttaaataacttcctctggtttctgggcttgttttttccatcatttatcaatatgcacagcatgtagcaattttctacctcaaaatacttgtggagaagcttgtaatgaattgctattgttctatctattaatgagtgtctccaccacagaggccttccgccagatatgtccttatggaagtgggatcatcgtgggacctgatgattcagcagttggtcagttgcctgtgctggattctcagcatttctcagtattctcaatctgcttcttctctagttattcttatttttctccatctatcttggaaaattaagtgctacttttttgtcccttcatttagatagcaattatattattgcattattagataatcttttgattaaacactgaaatgatcataatttatcttcacgtttaaaaaataccttgttattcactattttttttctcttgcttaagatatggacgaatgcaaagaacccgatgtctgtaaacatggacagtgcatcaatacagatggttcctatcgctgcgagtgtccctttggttatattctagcagggaatgaatgtgtaggtgagtaataagttttcttccataggaactttacaaattaaaaattaagctatacagtattcactgtatagccatgaatataggtaccaagatggcactgaaataagttttatccatccactcatacatcattcatttagaatactagtgagtcaccatcaggtcccaggcactgtgctaggctctggagctgcagcactgaaccacaaagacaagttccttcctttcatggaccttacagcctaatggtgaaggcagacactggacatatcagaagagatactagaaaggacaacatcataatgaaagtctttgtgaaattttttaaaaattgttaatggtcataatcttattcccttatcaaataaaaattttatctggattcttttacatttagtaagatgaaaggctatataaccagtacacaatcttttttttgtaaccctgtttttaaaatgtcaaataatggctcctctggctggcctttgacccttaatcaacactaactctaacttaaatccaaggatcatatttagttatctaagaattccagagtgattcaatataacataattaatactagcataaatgctgagagtttgtctgtgtgaattagaaagtactttttccatacaagaaatcaggttatgaagatttcagctccagctatggctgtgggagtttaagcagtttttttagcttttctaggccttagaatataatattatgcaagtaaaataacatttctaattacctttgcagctctaaagatcaatggtatcgggatttttattaacttgaaacagaaataatattcttgacagtaattgaatattatagtagaacaaaagcaaatatttcaatgttttctcctcagaatcttcagttagtgctaatatgtgcatatgaaatgagcctcttcgcctaggagctccccaccatagcctcttgcctttacttttgacttaagaacctcagcacaagaaacaactgttgacaagagccattactcttctgtgccttagatagctaaaatatcaatgttatttctcaaaattatttctttcctaaggggagatattctccccaagggatgtgtcagaataagaatggtgagtattctaggtggatgggttagaaggcatatatacacacacacacacacacacacacacacacacacacacatatacacatatatatacacacatatatatacacacatatatatacacatatatatacacacatatatatacacacacacatgcacacacacacacacacacacacattttaggtctctggtcaaagatttgttctctccgcctgtgttttagagcggtcataacctaaacatatttttttctagcctttcctcttcctaatgtaaaccatctggtttcaacagaatcaacacaatctacttgaatcttgattttatttgatgtattaattttacttaacctctggtcttttattttacgtaagtttagtcttttattttatatctggcaaaaatccatcatgtttaaggcttcttggggagtgatgtaatgtaaggccaaactgtggatgtatttctgctttaaacaagcagaaacttttgacgagtgataggggcctttttttttttaacccttagagcatctactccaagtagaagatttagtttataatgtgggaggctggagaaactcatggagaagagcactgtaagggctatatgtccaggcactgtcattctcactgtcattgccactgccactgagcaagtcgaatttcacggctataaacctgagataataagacatgcacactccctttttgcaagaacagaatgagaattaaacattacagatcaggctgggcttggtggctcacacctttaatctcagcactttgggatgccgaggtgggcagattgcttgaggtcaagagttcaagaccagcctggccaacatggcgaaaccctgtctctactaaaaatacaaaaattacctgagcgtggtgatgtgcacccataattccagctactcaggaggctgaggcatgagattcacttgaacctgagaggcagagtttgcatgagctgaaatcgcgccacagcactgcagtctggatgtcaaagtgagactctgtctcaaaacaacaacaacaacaaaattacagtttaaaatcctctgatagaataaaaggtattatctcaattcatcatgttttggacacattcctggtttcttgcagatactgatgaatgttctgttggcaatccttgtggaaatggaacctgcaagaatgtgattggaggttttgaatgcacctgcgaggagggatttgagcccggtccaatgatgacatgtgaaggtacatctcttaaacagagaacagttgattacgtgtactgatcctgggaacaattggttgattacaagtcttaatattaaatacaactcagggtgtatataataaagatcatctaggcctgatgggccatttgatcattcttcttttgtggcctcttctctgtagggaaagagagatatccaagaatgatacagttgtgtgttcatggcacatctacactgtatatcacagagagttctcattggtgtttccctaccacttatatttagatgcttccgtgttgtttaataccttctttcttactctcactttctccttctttctgtctctcatactccctttctttttcttttctctttttctcttcttttctatttctaggagcactgcacactaagatacccaccatcatcctgtagccatttggaggcaatcacagcaaaagcggttgcctgtaatatataagcatctgaaaagtgtccatccgtaagcctggtggaatgtatggaaagaaggaaagggagggagtgtctagagcagtggctctcaaagggtggttcccaggagcagctgtatcagcatcacctgggaacttattagaaatgcacattgtgaggcctcatccaagacctcctaaatcagaaactccgagagtggggtggagcccagcagccctctaggtgatctgatacactctcaagtagggattcactggcctaaggaaagaatgaaggagaggtgaaggcagagaataaagttggtagcaaagagagctcttcatcagatatgatctatcaaatgcccattgtcagagttgtggtaaatctttaaaggttgtgactaagtcatgatctgggctctcactcgtgttcttagtcagcactggccttggggagcaacatgatagttgagatggtctattttaatcctgcttttccaaaacacattctgatggttccaaactctgcagtctgcagaaatgactttttttccattaacagtaaactcattcccatctatttaaggtttgaacatgggcatctgtgtaaactgagtgtctctgtcagtataaaatgatctggaacactatttgcttgggcagaagaattgctgttatttcacaggagcctctttgtttgggggaaagagaggtggttaacaatattggaggagttggtttctgttctgaccacaattgttttggcggaatggggcaaaactgattcccacgccatgtaactgttgggagtgacaaatggtcaacctgagccttctaagccaaaatttcagaagagcccctcaaatgttgggtggcctgtaatttcccatccacctaaataatcattaataattataccaggacaacaaacataaactgggactgtgctgggagaaccgggatggagagtcactctgtttataccaaatataaaataatcaacccattttataatttccgggaaatgggagaccacttgatccatccatgtttatgacaatgaagcattgcaacttttggtaaagttttagagttttagttcaattggtaggttcccttttgttgctgtccatgatcccttatttacttactctcctctgctgcagatataaatgaatgtgcccagaatcctctgctctgtgccttccgatgtgtgaacacttatgggtcatatgaatgcaaatgtcccgtgggatatgtgctcagagaagaccgtaggatgtgcaaaggtgagtcatcgtgttcaaggtcatctaagccaggaagctttatctgtgaggggagatgtccctcaaagcttcccttagtaggagaaggctgggaattggaatataaatagtccgtggacaatacgggggttgtcactgccacgtttccccctaaattgtagctggaagcatcatcaagccaagttgaggactgcactgcacatcctttattaggtctcactgtgcatcgcatgctcacaacacgccagtatttctacaagatatgggaatagaaagaaaaagacatttccccacgttcaaaaaacccaatatgaagagattgagacagatataaatacgttctcataatacagtgtgataaatgctatggtgattatatatacaaaatgctctgagaacaccaaaggatattctatttcaagaatggggtaacacgtggaatctactttagctaaaccatctccattaaaaatacctcctgaacacctgcaatttcctaagcactgaactaggctctatttcacaaactgcagtaatcatagagtttgctcttgaagagctctgatttgctcctgtcaatatcttaaatgaacagacacctgttctctcaagatggcgtaaatataattttgcttaagggtggggaaatttcctaaatgaaaggtcctaatcatatgcagaataaatttcaaatttctcagctcagagcatgtaaacgggaaagatagaaaaataaagaagtacaataggacagaaagtaaagactgaggaaggcccaaccaagtccagaaaaggaaatgaaggagggaagaaccagtagagaataagatatttgagatatataatataaaatagtcatttactattatatcctgtttactaatattatcatataaaaataatgtcatattggccaggcacggtggcttatgcctgtaatcccagcactttgggaggccgaggtgggtggataaccagaggtcaggagtttgagaccagcctgaccaacatagtgaaaccctgtctctactaaaaatacaaaaaattagctggcgtgatggcgcattcttgtaatctcacctacttgggaggctgaggcagaagaattgcttgaaccccggaggtggaggttgcagtgagctgagatcatgccactgcactccagactggatgacggagtgagactccatctcaaaaaaataataatatcatattataatatattgtgttattattataattattgcataatgtaagctttggtttgttactcttacaatccattatgattgtagtactattataattattgccttatcatatattgtgattataatgctgttataattattgttatattaagatatatccattatattataattacatgaggcccttttagttcaattagtcaacaagaattagaaatcatgcttcaacaaaggagtataaaacataaagggacagccaggcacgatggctcatgcctgtaatcccagcactttgggaggctgaggtgggtggatcacttgaggccaggagtttgagaccagactggacaacatggtgaaaccccatctctactaaaaatacaaaaaaaattagccaggcgtggtggtgcatgcctgtaatcccagatacttgggagactgaggtatgagaatcacttgaacccgggaggcagaggttgaagtgagctgagatcgggccactgcactccagcctgggcaacagagagagactctttcaaaaacataaataaataaaaataaaaataaataaaaaataagggaaggagaagagagaaaaggcatgatcagaatcatgcttcttgaagaggtcatcagttgattagggagcaatttcttcaagttcaaaggtggttagaagattcctttccattctttagagatcatactcaacagagcagaaggaaatacagccagtagtgaaataacagatgaaaattggttacttactaacattttatgtttaaaagtcaggtaattaaggcagatatatgcattttctttgacaaatttgtgattgtacattttttacagatgaggatgagtgtgaagagggaaaacatgactgtactgaaaaacaaatggaatgcaagaacctcattggcacatatatgtgcatctgtggacccgggtatcagcggagacctgatggagaaggctgtgtaggtaagaggatccctgtggaaggagctttgagtgcatcagaagtgacagtggacagaaggaacctgggctctgagttcttgggatactgttcttggcgagacccattttgttctcttaaccgcatgtcaggactctccatggtggttcccttgcctcgtgatcatttgtgaattccaagagcactgtcattgtccctctgatctggcctttgtctgctttcttgacccatttgctgccaggatttgaacagcatgccttttctctattctcctcctttactttccatactcttttgttgatttgggggtcaattctccccatcacattggaatgcttccctattgacttagctttgctacaaatgccaggtacctctgaatcaggaatatctcaaaaccattgggatctacctccagaaaatctggtcttgtctagagtagcatccaggcactgatatttttttaaagctcctcagctgattctaatagggatccaacattgaggacttcagccttagaccaggagttggcaaactgcctacaggctaattccagcctgccagcccactgtgtgtttttataaataaggttttattaaacataggtataaccattcatttgcatattgtccatggctactttcatgccacaatggcagagctaagtggttgcaactgagaccatatgacccacaaagcctaaaatatttcctatttgaccctaacaaaaagtttcctgacctctgcttagataataattacaggagaaaattattaaaaccttctcacacgcattctctttctttttaataataaatggtattataaagatatattttatgttgtcattcaagaagattaagaatcccattgcccttttactctgtacaatacagattgaagcaggaattaaagaacagattctaaaagcacagaatcagaaaatatgtagattaattgtcacacactggatcctcctggatcagtaattctcaacctctgctgcactttggaatcatttggggagctcaagtccaacctcagatattctgattgaattgttctgggggtggctggggcattgcattggggttttgaacctgttttaacactgttctggattcaccttccaactttctctctttcctagtgagagctccatctgagggaccctgaactattctcaaaggaagggaagcacctcagcaaattatttttgatctttctaaataatcatcagataattctaagaatctgtagatattttaatgtttttttaaacctgggaaactgagttgtagtttatgatttcttaataatattgttgaaatattacaataaatgcaacctatattggagatataatctaggttaatctgaagattaatctagacaaactcccccagatcaatattgaccattacagatattattctaacatgtattaaaatatttctttcatatgctgatattcacatttttccctccttcacttgaaataacactttgagagtcctttttatgtcctaatatgaaaagatttaaattttactaagtgaaaaatgtaagtgtgcataaaatgctaccatctatgtttaagtatataaaatgctatcagttaggcttttaaaagatctgaagtgcacacacacatacacatattatgtatgtatttgcttttatatgcataatccagctctggaaggatacattagaaatcggccccagaattggttgcttttcaggaggggagtttggtgtctgggaaataggaaatgaagggggtacttttgctgaatctccttttgtacctttttaattttgaaccatgtgaagagataagctatttacaaactatataggaaagaagaaaatctattcttctataaaagattcagatggctctttctgttttcagtctttcaatgaaaccaaacagttaagaatgaattgaagtctcttttataccttttaaattttgagccatgtgaacagattagtgattcaaaagctaagttaagaaggaaagatgtgagagagggaaggaaggtgagagggagggaagggaggaaggaaaggagaaaggaacaaagggagggaaggagggagggaggaaggaaggaacgaaggaaggagctccatcctctataaaatggtcagatgactcttcttgtttttggtccttcaataaaatcaaacagatgagaatgaatgtcagacgaagccagggatctgtgagaatgggcgctgcctcaacacccgtgggagctacacctgtgagtgtaatgatgggtttaccgccagccccaaccaggacgagtgccttggtgagtacagttggcaccgcactttcctaacctcagcctccacactgggatgctggaaacccagacttcttatttaaaatacaagaaaatgtcaaaatctgaggaaggataaaaaatgttcatattttggagatgccgtaatgactgtgattgtccattgggctcagcaccaccctgcagctaaattcttcctttgctaattggatcctgaatcacttgtttggaatttcttggctgcctttgaagcccttggtgatcaggatccacttccgtatgtttctctgcccctctgtctgtaagcatggctattcccctgtatttctgggagcagagagagttataagcttgtctaggccaatgtctttctgcctacttactgaatgtcttatttgtttccctcagacgtcatcctttctcttttactgctgtctccagctttcccctcttgcttcttctcacccagggtaaagtgttacatccttttttggtttttatatctgaccaaatttttaatattttgtttgctcttaaaatttcctgacatcccctttgccatataatgtcccttccagacaatcgggaagggtactgcttcacagaggtgctacaaaacatgtgtcagatcggctccagcaacaggaaccccgtcaccaaatcggaatgctgctgtgacggagggagaggctggggtccccactgtgagatctgccctttccaggggactgtggctttcaagaaactctgtccccatggccgaggattcatgaccaatggagcaggtacttcatttatagtccaaaaatacttgcagggaatctatttatttgttttttgtgtgaaacacagatgaaaatatggagtttgcaatatgtgcctaggttgaattgcacagctgaggccaacaaaaattcttcattatggagttttagacatttgaggtcatgctgccaaagtggccttggtccacttgattaagctgtgtgtgcttaggaccctccctctgcattccagcgagtcttcaactttttaaaccgtttactataagtcaattggctactcagaatataatttttaaattttttagataaactttgaaataaatgattattaaatgtgcaaaccagtccaccaagatgtggaactcctaaaactggccaaactgtattgcataaaagaagtataaatcatgctgatatcctggcaattagacacaattgcatctggaaaagcacaagctccttaactagagcaggatgaggaagtgtcagactgtctaaggcaactctagagatatctaggcctgtcaccaatatgattcctgtgtttatcaactgtaactacaattggtttttagttcataaaaggactgagaaaaggtgagagcttttttgagcttcttgggagggaattagaagtgaaaggggaagaaggaggttaagaaggatttgtgtttgtattggaaagatgtggctgaaggcagaataatggaactggatgtgatttaaaaaaaaagaaaaaacagacctagaaaggtaagatggagtgaccaaaagcaatttatgattctttggaggatgtagcaataagatagccgaaaaaactcacttctggagaccaataagagtgtgctaaattgcacttcagagtagacttgtaaaggtcagatacacccagctgttggtataaaatggttatttggcagtcaagggctgagaacccatgtagaaagtgcttgtatcggcacttcgccaagcagtaaggaggtaaaatgggtcaagatgtggaagacagtggttttaatgctcaacagtgcatattgacccagtctttctctctgtggtacagccatgagtgagggtctcccttccttagcaggctgcaaaaacccagcactgtcatccacctcagagccctggttagtttcccccctcaccagaggacagaagttcatctcatttccccaatattatgtaatttgaactttttcaggattaaccacaaagacaacaaaaataatgtaaaaacaaaaaacaaaaaaccttacttattttgagcatgcaatactagggggtggaaatggggtttcctcatcaaaaggatctgcttctgtgattcatttattagatgtcagcaggaggcaagcttaatggcatgagatgacacaaaaagccaaatatgtctagatggggtggctgttctatggatccagaagagaaaaatatacatttagaagaccagttgtttttaaagtttttctgtggctgaattattttatcaattgtagtctaatgaagttatttgtttaccttttgatatagctactgttacatattaaatttatgctgtcatcttactggtttaatttcttaggcccaaaatatagtaacacaatttattagtatttacactgaagtgaccccctacatattaatgttgtcaattttatgatatatttcttaatttatatttgttaaattacagatatcgatgaatgcaaggttattcacgatgtttgccgaaatggggaatgtgtcaatgacagaggatcatatcattgcatttgtaaaactgggtacactccagatataactgggacttcctgtgtaggtaagtgtctatttctgatggcttatcctcaagtggaaattttagattatggaaaaaaaaaaacccaaagctaaaaatctaaaaagtctgtgcagtttcataggaaagcacaggacaatcatcaaagtctacacagagtttcctttttctttccccgaaactaaaattcttcgttagaccctgtggaaattgagcgtgtacacatcatttttagatgcacagtcacgctgtatttctttgatcatagatctgaacgagtgcaaccaggctcccaaaccctgcaattttatctgcaaaaacacagaagggagttaccagtgttcatgcccgaaaggctacattctgcaagaggatggaaggagctgcaaaggtaaagtagaattgaccattgcccctcacctagctcctgacacatggctgcattcctttgcctgtaagaactccacaggcaagccgaaagacctgctctacaggcaggaggtgcttccctggggttaatgcctccatgggacctacctcctgtgctggagggaaggaggctaaagccagggagattgtggaggaagcagctgtccttgctgcatgccccctgggcatccatggtggccatccatgactgtctcagagatagcagggccagcttcaatggctctggtggggcagattcttaattggtgacctcctctctgctttctgttttttgtatttattctttatagctatatagttcaggtttccaggaaggtcctgcctcggaataatcagtgccatgatcgtagaggacattgtgcctaatgaattagatgctgtgtccagatttttgttctgcagaaaaagtctatttctgccctgtaggagcttccctgagacataaatatcacacagaattaagaaccagaaaagctctgggcagaaatcccttctcaaccagaagttatcctttgcaaaatttttttggtttaattttactcctgtaaacatcttcctccacaataagaacattatatttagtgaatagcactagtgagtcatacttaacaataatttgggaaatcagagatttggagaagaaaagatagaccaagtggtagagcaagagatatcatgtcatgccatgaaactttgaaggaaatttatagaaacatacagaagtaaggaaggtaaaggatagagtggagtctttttcctattttttctcataaagcttaagttcttccacttacttggtatatataactaaatatcaaatgaatgatgcagctgtgtgtaccactgaactgagaagaggctagaagggtggagggtgggaccagcacatccccacggaggatccagattggaggagaggagaggagagaagtggagagcagagagaagttgggctcttgacctctttcctgtgtctgctgaaagggagagttaagagacatgtaatagtggatgacatcatgggcaagtgcctgaggccttcctgtgcagcacaaagcctgtataatcctgtagtttggggagaggaagttgagagacctacttacacattctaaacatcttaaatgaagtcgctcatagctttgttcttctcaaatgtggaacttattttacatctggggtcactgtgagttctaggcaatgtgaagctataactcagagccataaatttattcatataaatgaagaaccaaattcaaggggaaaatatctctcattgtatatattatctgtaacaagcaaaacaaatttatagcattttttctaacctctgggggcagaaaattctcaaaagtttccagcaattaaaagatgaaaaatgaaaatgcatcaataaagttctctttatggctttaggagtgcaaagagcaactgtaatttttacatgtccactcacaacttgtcccttttcctgttttttcccataaggttcaaattcttccacttacttggtatatataactaaatatcaaatgaatagtgcagatagttgcaccacagtcactgagaaggaggaagccagaagggtggccgtgggagcagcacatccccagtgagagatgggtagaatgcagattagaggggagaagaggaggaagggcatcttggaggcaagagcagcaagtgctgctgttcttcatgtgttgtactcatgaaatggtgttaggagaaatcactgagtcatcttcctcacctgttgcaggtgagcttcagcaaatgtgtcatgatgctccagccaagctccttgggccatagacaggggaaaccagtccacagactctgagaaagctgaacagagagtgcatatcagtcaagatctcagcagtggaaagagcacaggacaggcagcattataagagaagccggaactaggacaggtctcgggagggtctctcagtgtaggtccactccagatgttactctagccaggaactggccctgtggagtggaagcagtcactggcaaagctggcactgatctgcagctccaaagcagttgtgcagatggtgagggcatagtggttgaatttgtgataaaataaagtcactaatgttttttcctgaatatgcgacaattttaaaattatcattaaagtttagctagaagctagaacacaacatttcatctcttggtattttgaaataacattggagttgagaatgcaacttagaagttgaggcgttgagaaaagaggcctggtcaaagcagagggttttattgagatgtgggaaacaatgttggataaacactgcaggcagttgtcagttttggatttttgttttttttgttttttgttttttgtttttgtttttgtttttgttttgagacgaagtttcactctgttgcccaggctggagtgcagtggtgcgatctcagctcactgcaacctctgcctcccaggtagctgggattacatgcacacaccaccacacccagctaatttttgtatattcactagagacaggttttgccatgttgcccaggctggtctcaaactcgtgagctcaaagtgatcagcctgccttggcctcccaaagtgctgggaatacaggcatgagccaccacgcttggcctggaggcagttttattaaaagtgcctttagctattaaaatgaatttttcctttgctttgtttccttcctgattgctcaattttggtttatcctaagaagaatcacgactaaagaaatcagattttgtttttgatgacttcatttgagtagattaaaaacagcaaacagaagagaactaagccagcaaattcatttccagcttcaacatttctctttatgttttaacttaaatagatcttttcaaagctctggaaaatttgcagaatcattcatctttcgcttcatttaaaaatttgtttaaaatgtcatgatttatttgaaattcctttgttgaggaattcctgcatttctccaattagaattgtgttttcttggatcccctaaagatctctttatatttttttgaggggaggagggtctaaattgacaccttgttttatctttcagatctttaccccctgtgtctctccttgccttttgctgtggcttctttctagtcagggtcatttgagacctccaaatcaaacgtggagctgcttcatagggtcagcttccctgatcctgttttgttggcttgactcaaatgcctctcttgcattttcttgtagatcttgatgagtgtgcaaccaagcaacacaactgccagttcctatgtgttaacaccattggcggcttcacatgcaaatgtcctcccggatttacccaacaccatacgtcctgcattggtgagtaggagaggaaaaaatcctacatggattgtagcgattcttttaagggattattttctatttcctctgctgttgggataagaaaataaaagctcaaagaaatatatgagtgcatgtatgtgtgagcacacctgtacatgtatgtgaagcgttgttggccttatttggccttttccgagttatccttctaattttcttttaaatgatacaaagagagctttggggaattttaacccctctttgcccccactgcttctcatagataacaatgaatgcacctctgacatcaatctgtgcgggtctaagggcatttgccagaacactcctggaagcttcacctgtgaatgccagcggggattctcacttgatcagaccggctccagctgtgaaggtgggtggagacttcagctgcgatccagctggtgaatccttgtggaggtggcctgtgtggctattggcaccttcatcatcagcctctatgagatagcagatctgagcccaggggggcactcagctaaaatagtgtgcacaggtcctgtatcttagagagtcgtgttttgtttcatgcttgattgtgtctaacacacatgcctttcctaagtatatcaagactttttctgctaagtttttaatttaacctaatagggaataactcagtcaagaaaaatatacttgattttgattcattaattttctggtcactgggtccagagccataaagggatttcccccatgtggactaaacatatgaggaatagctcttctgatgacatttaattagaagtttaaatgatatttttagaagttgactgtggctttgacacgttttggtttctaattgtggcaccaaaaataaaaaaaaaaaagagcaaacacaaataacttataacttacagagctgtcccagagagtgctttgggctttgcactaatttcctgacaatttttatttgtagactttgccagggctctctgaatgattttctccttggacttagcagcagttccagaagagagattcttgaagtttttggtggtagaataatgtgtaggatgtgtaggggccagatttcttattagaatccatctggcttcagagagagatgttgagttggcatcatggtggctctgcttctttttcagacgtggacgagtgtgagggtaaccaccgctgccagcatggctgccagaacatcattgggggctacaggtgcagctgcccccagggctacctccagcactaccagtggaaccagtgtgttggcaagtaacttttcctcactctcaagatgcatggctatcaggtcctatgaagcaaaacactgcttgctttctgaagctgtaaatgtgttattgaagcaacaaatactcatttaaaattgccctaacctggttgaaacccgaggtaagtaacagtctttgcaaaacagcaaactaagaaaaaaaattataattgagggtgctttgagagcatctgaaatgaaatgcccccagaatttcttgaagcgcaatatcctccaccctcccgctgcactgctagtcatcagcccacacttgagttatgttcatatcaggggtcaaaaaatcttacttatgactgaaaaatatcagccagccaaaggctattttgagtggcttttggcctgaagatgccaaagtagttctgttcagctctacacattttgagacagagcgcaagcaggaaacacagcaaggttgtgtttttttgtgtgttttgttttgttttgttttgtttttcaagattgctaaattcttttgataattaagggagatctactgactctctcattaaattgaaatgatgtcatctttgattctacaatgtcatgggaaaataactcttaatgcacatcagagaatcaaaacattgtgagtttggagggataccagaagccacttagctcaggcactttgttttacagataaggacctagaagtccagaaagggacggtaatatttccttgcccagttcttttgtgacatgcttggaactagaacccacaactcttaactttctgatgtagagctgcctttcaagtgtcacattcacttgtttatgttcattcagcaagcgtctgtgaagtgccactgcaagcttggtgctttggtaacctgttctagttgccacattattctgtacagagccctccttagcaaaaactcaaagaattactgcttcccgggtgcaggctctgcattgcaggggttcactttcatgcagatgaagacatatttggtgtgttttcatttatcaaaatcatctctgtcatctagtttgattctacacaagacagttttgcagtggcatgtagggttgactgaagtgacccctgtgctataggagtttcgactgcgtgagtctctggctagctatctggttttaataaaaatgtctttgttcattagcagctcagggaggtctttgattttaatcaccagtttctgacattgttcacagaacttccagagtgaactttgttgattcaacacccagtttatgagcctgtctgttctcattatttaggtcattttaataacactggagctaagtgaaaaaaacataagagaggaaaggtatgtcgctcctgtaccttatcctcctcctcctaccatcagtctgaggatggtagaggcgaccaggccatgcactagtgtcctggagattctgctctggtctcgtgaagatcatctcctggctggacactctaaaaaaacaagttgatttagaagtcagaagaagtttggggttcttaatgtctccaaatgccaaattgctctcatcaatcttgagaattagagttatctagaatgagcattgccgtgggctaaaatagcttccccagaaccacaagaaacagagcagatctcttagaccagccctccctggatcctcactcccaggtggctggaagttcactctttggggtaagagggccactaatttcattgctttctagaagtaaatttcaaaaaattcagcttgcagatagatagagttgacccattttcccctagagaaaatgagtaaaagaaagcccatcctgcatttgtgaagtttcctatcggtactcccttaaggccacagctaacatgaacagtgcaagctggatgctgaaacctttgattttagaggacagagtggtgggtttcaatccacttttaaggagtagttttcagactttaatgctattttggtaaaattcgaattgtctctttttataaaacaaacaaaaccctcaccaatctaagtaccaactggaagaataaaacaaatattttggagtgtaaaaaaattccttgtggagtcatttgctccagagtgcagaggatgaaaaaggtcaggaaaagtgcaaaacatgttaaccaaatcgtggtgtttgtatattgataaaaagggcgagtgcacaaacatgctgttttcaaactgtaaacactgaatatttgccaatttcttattttaatctgtgctctactccatcctacctctccaacctagataagcaagtttaatttaaactttattaaattctcagggaagggagaaaatgtaaaataaaatttaaaagaatgtgaaaggagagggggagaactcttgatagttgtagtaacacagatagatgctcaaagttaaaaagaaccttagagatctagccttctctctttcctaatatataaatccttctctaacttccttgcttatcccagtttggcttaaataccaccttgaagggtgcccactttctcccaagatagcccaatctatgtatagacagcttttaatacttagaaatgtctttttttgctataaaaaaaatcatttctcctccctctaatttctcaccattggtcctacttctgctctttggaggaaaaaacacagaataaatctaagctatagaatgacaagtcttccccctcatatacccacgccttgcaggttttattagtcagggtcccagcaagaagcagatggctgaggccaaccaaaagtgagggacaggggagcagagcttgctcatgctccatagatcagccacctggggccaagagcaagtggagaggatggaggatggacgtggaggagcaagaagacatcagcccaggggtgttctctccaatgaagtaaatatgcttcgttcttcattctttgtttgacatggagcttggtgccagtggtttctgttgctctctattgcacacttcgtcctcaatttaaaataaggagaaagaacacagataacgtgttgagcacagaaagagaaagggaagaatgagaaagataaaattattatttatattttaagagccctggagcctaagtgaccttgggtgaagacttgaaggtctttggatacaaaagattttcagacaggcagttaagatcaaagacctgtagctgaagggaaggagggaaagagagaaggaaggaggggaggagagaaggaaggaaggaaggaaaggaaggaaggaaggaaggaaaggagggaggggaggggaggggggaaggaaggaaggaagaaagggaaggagagaaggaaagaaggtaggagggaaggagacatggaaggagggaaggcaggcaggcaggcaggtaggaaatgtgaatatatactaagtatatacaagtgagcatccttccccaccacttttatccacctgttttctaatttaaaaaaaaagaaaaaatagatttgttgagaaacattatttttctttataaatgaatgtgccttagcaaagaaggtaaactaattacaggagaaaggaagcaccagcttaaatgtggagcgtctcttgagaggcactgtggtataaaggaaagcgcatggatggcctttgcagtccaacagacctggctgtgaatttctgccctgctgctgctggctgtgagatcttggaagagctttctgagcctcactttcttcagctgtaaaacagagaatataatacctctttctcaggattgttaggaaagctaaggaaatggtcaatacctgtatcctatctatcataaaataggtatctaataaacattcattcccttccccttcctctcttccataggaagtggttattcgctaagtgaagagaaggccaatctatctacattcaaatgaacgtatgcctgaaaatggactatggcagttaagaaatgtcttaccagcaactttccaacctgccctgcaaaggcagatctacaaaaatatattagagacttccaaaaattataaatcagaaataatgagaaactcatggttttcccccttctagctgatttttttaaagtaagatttctttttcctgcttcttagcatcagacttggcaggtccctgtgggtagccagccctgcagcttctgtctcacttgtgggttttccccaattactgcttgtgaagtctgcaccaaatctcttccagccacacttagttttagacagggctcagacactctgggcaggaggctggtttgaataaggagggggccgattcggtgatgggagcagacataccagaaggcattattcatctcccagaacaggtacctgggggcttttgcagaattttgaaaaggaagtccaagtggggcagacacgtggggcagacacttggggcaggatatcagcctttgccagatcagcatatcctgaaataggctgacagggaaagcagcctgcgggaaaatggttggtctctgcttttgagagatttgtctcctcgctgggcacttgtgaagcaagtacgcagagaactgcaagattcctttcctccccccttgaaccctaaatcttagctacggaccagccccatgttggttcatgaccggatgtttacatggagcagaagataccagtgttgacttctgatgagaactggagtctgctggtcctcagaatgccatcctctaatgccctctgcctggtgcatttgacttcatcttccatgtttcatcttccatgtttactcacaacatagcaagaagccacatccatgcccgcatctttctctgctgttgctctccccacccagccacctctgcctgtcttaccttcctgagagcctagctgagggccagctggccggcagcaagtggccagatccaatgtcctcaatagaaatctctggctgctgccacacatgccgcttcttattttgcctgcagatgaaaacgaatgcctcagcgctcacatctgcggaggagcctcctgtcacaacaccctggggagctacaagtgcatgtgtcccgccggcttccagtatgaacagttcagtggaggatgccaagacatcaatgaatgtggctctgcgcaggccccctgcagctatggctgttccaataccgagggcggttacctgtgtggctgtccacctggttacttccgcataggccaagggtaagcagtgctcttcctggtcatggttggagattctttcattcgtaatataattaagtatactgaactcaaaattacctgtcctagcagaggagaaccatgctttttgtaatcctaaaattaattccagttagcttggcaaaagttttaggttattttatttggaaggaagcatctggatttctggaaacgtcaaacaaagtaatgaaactacattgtaaatatctcgctatatgacttctctatcttattctcttgatcttcacatcttgttgggaagtgattcatctctctgtaaatacacctctctgccaacccatgacagaactgggctcaccctgcacacgactgatccactcttctcctggggcagggaggattctatctggacttaaaatgcctttgtatctagctcctgttagaataagtcaaagacatccctttgggttgaaaattatttagggttttaaattatattttacatttcagacttgaatttacattaaattttaccaaaggtgcattgaaacacttactgtattttcctggttaaaaaaagaaaaacaaaaaaaacacttcaccaaattataggtgtgtctgtgtgagagttggggcagggaaggccttttttttttttttttagacggagtcttgctctgtcgcccaggctggagtgcagtggtgcaatctcagctcactgcaagctctgcctcccgggttcacgcgattctcctgcctcagcctctggagtagctgggactacaggtgcccgccaccacgcccggctaattttttgtatttttaatagaaacggggtttcaccgtgttagccaggatggtctcgatctccggacctcgtgatctgcccgtcttgacctcccaaagtgctgagattacaggcgagagccactgtacccggccgggaaggcctatttttattttacccagtgatttaaaagtttagtgttaagttttcaaagtttggatcttttttcctgctgaattaatctggactcgggtgtccacctagttttagctatcctgagaggaagtgcacattttaactttttaattaggaacacatagacattaaatatatatatacattatgtactcctccacatgcgtgtacacacacacccccacacacatccacacttataccaaattattaatgtagcagtctttgatttcttgacatacaaacatcaagtgattcattttggatctgggtaggtagaagaatgtttcgtgggaagcacacagaatgccagcaatcagacacaaattcccagatgtttgtgtctggctctcagtagactcattctttatagtttaatgccagaaccatttcttcccagcaaaaattgtgacactctaaactggcttttggccagtgggattttgtagtcacacttcttataagtggtgctcccgggatatgaaaatactggaaaggagttctgagaaaggaaccaaagcctgcaaatttgcagtttacctcctaataatttaatcattgtgtgaatgtatacgcatgcgcacacacccacaggatgagcatttatcacttcatccattgtattgtttctacatatttcatgttgcaagataaagaggaaaggaaatgtattggactctggcaagattgggggaaacagtaggaacctataaactgctttgaaatacaacagatattctgttcattggcaacatattttgaatcctaagggtatataggaaaattagttctaaagagcagatcagctattacagaaaaacagataaataatttttggtctatattatgacccattgttagaaatctacccatttaaaacagttttggcctctccgaatcactagaatggactctgcccccaaataaagattcttttaaggaccattcaaatgtttcaacacatttggaaagaggagcttgataaatacacattccaagtggcctctgaaatagtaagcagaataacaaaacaaggtacttgtgaaacattcgagcctccctccgtaacttggctttgataactgaaaggcaaagaaaaacagctgaacgagttctctcttgggcatgggtttgtttatccatcttcacatgagtcggagccagtggccctagtggttttgaatgacttgaaacagtttcccacagttgggcaaactctgatacatgcattttatatacggcatatcttcatagtttattattaaattaaccttcattatcaaccggagctttcttcttatcctcagtagcataagcaaaagtgaaacgtcaaggaataggagcaattgctccaaagcttgagtgaggaaaagtaatgatggaagtgggagaatgcaagaaactcaacagtgatgtctcacaccttgctcactcccatggagcctgtttcataaaaagaagccatttttatttagcctcccaagttacatggcctccctcatctactattctcttgtttccactctgtgtctcctccccagtataagtactgcaaaatgctttccatgttaggtttgggaatgaagagataaataaatatccaagacagggtcttgataggcagtagaaggaaatcaatacattcagggaactgggaattagaggccaaacagaggacctcaatgtagttctcagaactagctgatcctccagtggacaagcaagggctgtatctcacaactgcaaggaacaggcttcaccagaactcttgtaccacctaccttgtcttcccattctaatgaaaaacatctatgctccccttctgctgcaggcactgtgtttctggaatgggcatgggccgaggaaacccagagccacctgtcagtggtgaaatggatgacaattcactctccccagaggcttgttacgagtgtaagatcaatggctaccccaaacggggcaggaaacggagaagcacaaacgaaactgatgcctccaatatcgaggtgggtcagaagttagtttctcctgatgtctcctgtggtggaaagcccttccagattcctgtggtttcctccaaggatgctccaaagtgtgaaaaagctccccagggagaaactccagacattccctgagctctaggctgtattttacaagaggctgtggggctttctggagtttcttgctgcttttcgggagtggccatttgaaggttttcacatacttgctcatttcctctgtctcgccaaaaaaaagtcaaatacccacccaaagtctgctgaaaggataaggtctgagatccaggacagcaagtgggcagaatagcgaagtgacatagtgctccctacataggaatgccaagttctgaaagctagaggctcctctactgaaaagagccatgtggagtgtgagggaacttggattgtagacaaaaataacgtggagctgaagcagcctggtttcctttgcctacggctgctgcagcctttcagtcaactcagaagtgcacagatattcacccagacctctggctctgggcccatagaatccagcacatgtggtcccagagaggcaagtaagaagccaggtgaaaagcattgaatattagcagatcatcacagtcaggaagtaggctcataggtgtgtccttaggagaagatggttttacgtcaatgaatcaaattgaaatagtctggttcttcgtattggtgctgcaacccatctgctgtcatttaagaaatgagataagtctttggaaagaacataatctattaaaacagtggttctcaaactttagcatgcatctgaatcacctactaggtcttgttaaaattgattgttgggagacatcccagggtttctgattcagtagttctggggtgatgccgagaatttgcatttctaacagattcccaggtgatgctgatgcagcttgttcagggactacattttgagacctccagatacaaatgatttcaacctgcctttcttcctgacatcagttaatattttcaaatattacaaatatgtgccaatttaatacacttgtggtctaaacaaaatgctttcaatattgtgtatgcagcataaggcagaaaattgtattagtgtgaaatttgagtcattttttctttaatatgagagctaagtggcatatgtacattgtatttaacatattgccatgtgtctttccaggatcagtctgagacagaagccaatgtgagtcttgcaagttgggatgttgagaagacagccatctttgctttcaatatttcccacgtcagtaacaaggttcgaatcctagaactccttccagctcttacaactctgacgaatcacaacagatacttgatcgaatctggaaatgaagatggcttctttaaaatcaaccaaaaggaagggatcagctacctccacttcacaaagaagaagccagtggctggaacctattcattacaaatcagtagtactccactttataaaaagaaagaacttaaccaactagaagacaaatatgacaaagactacctcagtggtgaactgggtgataatctgaagatgaaaatccaggttttgcttcattaattcaccatccagagaccaaataattaaaagaaaaacaaatatagataggtagaactatattttcccccaatcagaatcatcatatcataggtacaatctttcaccaagtaaatttgtataaataagcactattctttgtattaccaaagcaaggtacaggtgactaccctagttcaaaacaaccactttctcaggcttctcatgtgtgtagctaagctaccttgtcatatgtgttgattcttgaaaactgggacgtgtatttccattgggggttggccatttatgctgacatgccatccttccagcaaacgtacgggaatgtgctttcaattgatggactactctattttttgcaaatttgtaaactttgcttctccaaatacaagtactaggttgtccatttatggtacctatttggtgctagtaaattttcaaactagatttataaatgcactgtaatatgtacacaacttagaaaccaaattacaagtattcagttccaatacttcattaatttcaatcaaccaaagttagttcagtagcttatctcagttatgagtataatacattacatgtaaattaagtgtgtgtatactgtaatcgtgctattttttatcattgaaacatttataaactagaataataatgcccttaatgtgagggtttgtaatggtgcttattaagaccaaagacttgttaaatgtatacaccaagtggtaatgaaatttcggtgactggcccacacgtgcatagaggtctgggaggaccaggaaacagcctcagtggccagaggatcaccagtgcatccttcatcacagcatgtgcaatatgccaagattaccctcggtcattcctgtcaacaaggggtcaatgtcataaatgtcacaataaaacaatctcttcttttttttagtttaccccttggctttgtgttcttgcatggatttggggttggaggggccattccggaggctaaataaagtctcctggatttaaattatcctgggtctcttacttatggcttatgaaagtaccaaatgtataaccactagaagaaaatttaacatatgagtcgatcccttgttttatccattgaaagtagcagagtctggtgtcattaacctgacttgcttgtgagaaatttagattgtagagtcatttctgaaacatgacctaattcatcttgtgacttttaaatagtcttaaataccaagttcagtcattgtcttagagcacatgaatttcattataatagatttatcatgcccccctctcaaatatacacagttttggcaagccttaggtgttctgttccatttttttttcccctaaacatctttcgttagtcaatgctcatctaattacaaagggataatcccagactgtatccaattgctgtaacttttggtttcttaatgtcataatttttaaagtctgttttattttaagtgcaatattgagtatttagctgttaggctcaatccgtcgatatgaaataattttttaaatccctaagggcaggaaagcatttcgtggtagtgaaaataagaggaaataagatggcatgaaggtggtgggcggagaaactaggtaggacacaggaaagtgctctcaaaaatctttgaagagctcagctgaaaaaaatggagtagatttggctcatactattccggaaggcaaaaccagggtcagctgatgtcagccccagtttaatacacacggtcccaattatagagctactcactgaaagaatgggtttccttgcattgtggtgagctccctgtcacaagatagaagagtttcagtctaggcttaatggcaaccattggacaaagatgctttcttccacctaacaggccattaacatcttaaaggtatttttgtatctctaattttgtttataataggtgctcaacagaatgagctgaatggctgttacaaagggggtttgtaccttgggtaagagattaaaatataactcaaaatttccttctaacgctgcacctatggaaccatgtgatagaggtgtattaaaattgttatcgaagaatatatagcatatggtaaacaacagtttgcatatggaaaatgtctttgataatttaaccagaactgcattatattcaataacggattttctttataacaaacaacaggggaaaatggagttggcacacagtggatcactttgatatttttaatagtccaagtctggattttatttattcctgagccaacaattttgaacagcatattttccatgtttctgactgtaacaaaacattttcctcattgttccattgtaaatattcctcttgttggaactctttttaatcctgagatttaaacctgtacctttcaattgtctgtgacctttcaatttcactttcaatagttgaagaacttggctttgtaaatctctcagaagcttgaaaatatcttgtctctaccccctcagcccatttcatttgccaataattattttgtaagtagggttgaaatgaactcagctggccttgtgaaatgtttaaacttgcacaaacaactacatttttgttcaacaaatagcagtttactcagccaaaatcactttggatattgccattacaaatactgttaaacttcagaaatcatgtctgtaaattagatgagccaaaataaaggacaattgggttgatgctgca

SEQ ID NO: 3 - DNA, 11609 bp, Homo sapiens
  source 1..11609: mol_type = other DNA
agagactgtgggtgccacaagcggacaggagccacagctgggacagctgcgagcggagccgagcagtggctgtagcggccacgactgggagcagccgccgccgcctcctcgggagtcggagccgccgcttctccactggcaggggccgcctgaagtgggagcagcgcctggagaaggcgggaggagcccggcccgggggacgggcggcgggatagcgggaccccggcggcgcggtgcgcttcagggcgcagcggcggccgcagaccgagccccgggcgcggcaagaggcggcgggagccggtggcggctcggcatcatgcgtcgagggcgtctgctggagatcgccctgggatttaccgtgcttttagcgtcctacacgagccatggggcggacgccaatttggaggctgggaacgtgaaggaaaccagagccagtcgggccaagagaagaggcggtggaggacacgacgcgcttaaaggacccaatgtctgtggatcacgttataatgcttactgttgccctggatggaaaaccttacctggcggaaatcagtgtattgtccccatttgccggcattcctgtggggatggattttgttcgaggccaaatatgtgcacttgcccatctggtcagatagctccttcctgtggctccagatccatacaacactgcaatattcgctgtatgaatggaggtagctgcagtgacgatcactgtctatgccagaaaggatacatagggactcactgtggacaacctgtttgtgaaagtggctgtctcaatggaggaaggtgtgtggccccaaatcgatgtgcatgcacttacggatttactggaccccagtgtgaaagagattacaggacaggcccatgttttactgtgatcagcaaccagatgtgccagggacaactcagcgggattgtctgcacaaaaacgctctgctgtgccacagtcggccgagcctggggccacccctgtgagatgtgtcctgcccagcctcacccctgccgccgtggcttcattccaaatatccgcacgggagcttgtcaagatgtggatgaatgccaggccatccccgggctctgtcagggaggaaattgcattaatactgttgggtcttttgagtgcaaatgccctgctggacacaaacttaatgaagtgtcacaaaaatgtgaagatattgatgaatgcagcaccattcctggaatctgtgaagggggtgaatgtacaaacacagtcagcagttacttttgcaaatgtccccctggtttttacacctctccagatggtaccagatgcatagatgttcgcccaggatactgttacacagctctgacaaacgggcgctgctctaaccagctgccacagtccataaccaaaatgcagtgctgctgtgatgccggccgatgctggtctccaggggtcactgtcgcccctgagatgtgtcccatcagagcaaccgaggatttcaacaagctgtgctctgttcctatggtaattcctgggagaccagaatatcctcccccaccccttggccccattcctccagttctccctgttcctcctggctttcctcctggacctcaaattccggtccctcgaccaccagtggaatatctgtatccatctcgggagccaccaagggtgctgccagtaaacgttactgattactgccagttggtccgctatctctgtcaaaatggacgctgcattccaactcctgggagttaccggtgtgagtgcaacaaagggttccagctggacctccgtggggagtgtattgatgttgatgaatgtgagaaaaacccctgtgctggtggtgagtgtattaacaaccagggttcgtacacctgtcagtgccgagctggatatcagagcacactcacgcggacagaatgccgagacattgatgagtgtttacagaatggccggatctgcaataatggacgctgcatcaacacagatggcagttttcattgcgtgtgtaatgcgggctttcatgttacacgagatgggaagaactgtgaagatatggatgaatgcagcataaggaacatgtgccttaatggaatgtgtatcaatgaagatggcagttttaaatgtatttgcaaacctggattccagctggcatcagatggacgttattgcaaagacattaacgagtgtgaaacccctgggatctgcatgaatgggcgttgcgtcaacactgatggctcctacagatgtgaatgcttccctggactggctgtgggtctggatggccgtgtgtgtgttgacacacacatgcggagcacatgctatggtggatacaagagaggccagtgtatcaaacctttgtttggtgctgtcactaaatctgaatgctgttgcgccagcactgagtatgcatttggggaaccttgccagccgtgtcctgcacagaattcagcggaatatcaggcactctgcagcagtgggccaggaatgacgtcagcaggcagtgatataaatgaatgtgcactagatcctgatatttgcccaaatggaatctgtgaaaaccttcgtgggacctataaatgtatatgcaattcaggatatgaagtggattcaactgggaaaaactgcgttgatattaatgaatgtgtactgaacagtctcctttgtgacaatggacaatgtagaaatactcctggaagttttgtctgtacctgccccaagggatttatctacaaacctgatctaaaaacatgtgaagacattgatgaatgcgaatcaagtccttgcattaatggagtctgcaagaacagcccaggctcttttatttgtgaatgttcttctgaaagtactttggatccaacaaaaaccatctgcatagaaaccatcaagggcacttgctggcagactgtcattgatgggcgatgtgagatcaacatcaatggagccaccttaaagtcccagtgctgctcctccctcggtgctgcgtggggaagcccgtgcaccctatgccaagttgatcccatatgtggtaaagggtactcaagaattaaaggaacacaatgtgaagatatagatgaatgtgaagtgttcccaggagtgtgtaaaaatggcctgtgtgttaacactagggggtcattcaagtgtcagtgtcccagtggaatgactttggatgccacaggaaggatctgtcttgatatccgcctggaaacctgcttcctgaggtacgaggacgaggagtgcaccctgcctattgctggccgccaccgcatggacgcctgctgctgctccgtcggggcagcctggggtactgaggaatgcgaggagtgtcccatgagaaatactcctgagtacgaggagctgtgtccgagaggacccggatttgccacaaaagaaattacaaatggaaagcctttcttcaaagatatcaatgagtgcaagatgatacccagcctctgcacccacggcaagtgcagaaacaccattggcagctttaagtgcaggtgtgacagcggctttgctcttgattctgaagaaaggaactgcacagacattgacgaatgccgcatatctcctgacctctgtggcagaggccagtgtgtgaacacccctggggactttgaatgcaagtgtgacgaaggctatgaaagtggattcatgatgatgaagaactgcatggatattgatgagtgtcagagagatcctctcctatgccgaggtggtgtttgccataacacagagggaagttaccgctgtgaatgcccgcctggccatcagctgtcccccaacatctccgcgtgtatcgacatcaatgaatgtgagctgagtgcacacctgtgccccaatggccgttgcgtgaacctcatagggaagtatcagtgtgcctgcaaccctggctaccattcaactcccgataggctattttgtgttgacattgatgaatgcagcataatgaatggtggttgtgaaaccttctgcacaaactctgaaggcagctatgaatgtagctgtcagccgggatttgcactaatgcctgaccagagatcatgcaccgacatcgatgagtgtgaagataatcccaatatctgtgatggtggtcagtgcacaaatatccctggagagtacaggtgcttgtgttatgatggattcatggcatctgaagacatgaagacttgtgtagatgtcaatgagtgtgacctgaatccaaatatctgcctaagtgggacctgtgaaaacacgaaaggctcatttatctgccactgtgatatgggctactccggcaaaaaaggaaaaactggctgtacagacatcaatgaatgtgaaattggagcacacaactgtggcaaacatgctgtatgtaccaatacagcaggaagcttcaaatgtagctgcagtcccgggtggattggagatggcattaagtgcactgatctggacgaatgttccaatggaacccatatgtgcagccagcatgcagactgcaagaataccatgggatcttaccgctgtctgtgcaaggaaggatacacaggtgatggcttcacttgtacagaccttgatgagtgctctgagaacctgaatctctgtggcaatggccagtgcctcaatgcaccaggaggataccgctgtgaatgcgacatgggcttcgtgcccagtgctgacgggaaagcctgtgaagatattgatgagtgctcccttccgaacatctgtgtctttggaacttgccacaacctccctggcctgttccgctgtgagtgtgagataggctacgaactggacagaagcggcgggaactgcacagatgtgaatgaatgcctggatccaaccacgtgcatcagtgggaactgtgtcaacactccaggcagctatatctgtgactgcccacctgattttgaactgaacccaactcgagttggctgtgttgatacccgctctggaaattgctatttggatattcgacctcgaggagacaatggagatacagcctgcagcaatgaaattggagttggtgtttccaaagcttcctgctgctgttctctgggtaaagcctggggtactccttgtgagatgtgtcctgctgtgaacacatccgagtacaaaattctttgtcctggaggggaaggtttccgaccaaatcctatcaccgttatattggaagatattgatgagtgccaggagctaccagggctgtgccaaggaggaaaatgtatcaacacctttgggagtttccagtgccgctgtccaaccggctactacctgaatgaagatacacgagtgtgtgatgatgtgaatgaatgtgagactcctggaatctgtggtccagggacatgttacaacaccgttggcaactacacctgtatctgtcctccagactacatgcaagtgaatgggggaaataattgcatggatatgagaagaagtttgtgctacagaaactactatgctgacaaccagacctgtgatggagaattgttattcaacatgaccaagaagatgtgctgctgttcctacaacattggccgggcgtggaacaagccctgtgaacagtgtcccatcccaagtacagatgagtttgctacactctgtggaagtcaaaggccaggctttgtcatcgacatttataccggtttacccgttgatattgatgagtgccgggagatcccaggggtctgtgaaaatggagtgtgtatcaacatggttggcagcttccgatgtgaatgtccagtgggattcttctataatgacaagttgttggtttgtgaagatattgacgagtgtcagaacggcccagtgtgccagcgcaacgccgaatgcatcaacactgcaggcagctaccgctgtgactgtaagcccggctaccgcttcacctccacaggacagtgcaatgatcgtaatgaatgtcaagaaatccccaatatatgcagtcatgggcagtgcattgacacagttggaagcttttattgcctttgccacactggttttaaaacaaatgatgaccaaaccatgtgcttggacataaatgaatgtgaaagagatgcctgtgggaatggaacttgccggaacacaattggttccttcaactgccgctgcaatcatggtttcatcctttctcacaacaatgactgtatagatgttgatgaatgtgcaagtggaaatgggaatctttgcagaaatggccaatgcattaatacagtggggtctttccagtgccagtgcaatgaaggctatgaggtggctccagatgggaggacctgtgtggatatcaatgaatgtcttctagaacccagaaaatgtgcaccaggtacctgtcaaaacttggatgggtcctacagatgcatttgcccacctggatacagtcttcaaaatgagaagtgtgaagatattgatgagtgtgtcgaagagccagaaatttgtgccctgggcacatgcagtaacactgaaggcagcttcaaatgtctgtgtccagaagggttttccttgtcctccagtggaagaaggtgccaagatttgcgaatgagctactgttatgcgaagtttgaaggaggaaagtgttcatcacccaaatccagaaatcactccaagcaggaatgctgctgtgccttgaagggagaaggctggggagacccctgcgagctctgccccacggaacctgatgaggccttccgccagatatgtccttatggaagtgggatcatcgtgggacctgatgattcagcagttgatatggacgaatgcaaagaacccgatgtctgtaaacatggacagtgcatcaatacagatggttcctatcgctgcgagtgtccctttggttatattctagcagggaatgaatgtgtagatactgatgaatgttctgttggcaatccttgtggaaatggaacctgcaagaatgtgattggaggttttgaatgcacctgcgaggagggatttgagcccggtccaatgatgacatgtgaagatataaatgaatgtgcccagaatcctctgctctgtgccttccgatgtgtgaacacttatgggtcatatgaatgcaaatgtcccgtgggatatgtgctcagagaagaccgtaggatgtgcaaagatgaggatgagtgtgaagagggaaaacatgactgtactgaaaaacaaatggaatgcaagaacctcattggcacatatatgtgcatctgtggacccgggtatcagcggagacctgatggagaaggctgtgtagatgagaatgaatgtcagacgaagccagggatctgtgagaatgggcgctgcctcaacacccgtgggagctacacctgtgagtgtaatgatgggtttaccgccagccccaaccaggacgagtgccttgacaatcgggaagggtactgcttcacagaggtgctacaaaacatgtgtcagatcggctccagcaacaggaaccccgtcaccaaatcggaatgctgctgtgacggagggagaggctggggtccccactgtgagatctgccctttccaggggactgtggctttcaagaaactctgtccccatggccgaggattcatgaccaatggagcagatatcgatgaatgcaaggttattcacgatgtttgccgaaatggggaatgtgtcaatgacagaggatcatatcattgcatttgtaaaactgggtacactccagatataactgggacttcctgtgtagatctgaacgagtgcaaccaggctcccaaaccctgcaattttatctgcaaaaacacagaagggagttaccagtgttcatgcccgaaaggctacattctgcaagaggatggaaggagctgcaaagatcttgatgagtgtgcaaccaagcaacacaactgccagttcctatgtgttaacaccattggcggcttcacatgcaaatgtcctcccggatttacccaacaccatacgtcctgcattgataacaatgaatgcacctctgacatcaatctgtgcgggtctaagggcatttgccagaacactcctggaagcttcacctgtgaatgccagcggggattctcacttgatcagaccggctccagctgtgaagacgtggacgagtgtgagggtaaccaccgctgccagcatggctgccagaacatcattgggggctacaggtgcagctgcccccagggctacctccagcactaccagtggaaccagtgtgttgatgaaaacgaatgcctcagcgctcacatctgcggaggagcctcctgtcacaacaccctggggagctacaagtgcatgtgtcccgccggcttccagtatgaacagttcagtggaggatgccaagacatcaatgaatgtggctctgcgcaggccccctgcagctatggctgttccaataccgagggcggttacctgtgtggctgtccacctggttacttccgcataggccaagggcactgtgtttctggaatgggcatgggccgaggaaacccagagccacctgtcagtggtgaaatggatgacaattcactctccccagaggcttgttacgagtgtaagatcaatggctaccccaaacggggcaggaaacggagaagcacaaacgaaactgatgcctccaatatcgaggatcagtctgagacagaagccaatgtgagtcttgcaagttgggatgttgagaagacagccatctttgctttcaatatttcccacgtcagtaacaaggttcgaatcctagaactccttccagctcttacaactctgacgaatcacaacagatacttgatcgaatctggaaatgaagatggcttctttaaaatcaaccaaaaggaagggatcagctacctccacttcacaaagaagaagccagtggctggaacctattcattacaaatcagtagtactccactttataaaaagaaagaacttaaccaactagaagacaaatatgacaaagactacctcagtggtgaactgggtgataatctgaagatgaaaatccaggttttgcttcattaattcaccatccagagaccaaataattaaaagaaaaacaaatatagataggtagaactatattttcccccaatcagaatcatcatatcataggtacaatctttcaccaagtaaatttgtataaataagcactattctttgtattaccaaagcaaggtacaggtgactaccctagttcaaaacaaccactttctcaggcttctcatgtgtgtagctaagctaccttgtcatatgtgttgattcttgaaaactgggacgtgtatttccattgggggttggccatttatgctgacatgccatccttccagcaaacgtacgggaatgtgctttcaattgatggactactctattttttgcaaatttgtaaactttgcttctccaaatacaagtactaggttgtccatttatggtacctatttggtgctagtaaattttcaaactagatttataaatgcactgtaatatgtacacaacttagaaaccaaattacaagtattcagttccaatacttcattaatttcaatcaaccaaagttagttcagtagcttatctcagttatgagtataatacattacatgtaaattaagtgtgtgtatactgtaatcgtgctattttttatcattgaaacatttataaactagaataataatgcccttaatgtgagggtttgtaatggtgcttattaagaccaaagacttgttaaatgtatacaccaagtggtaatgaaatttcggtgactggcccacacgtgcatagaggtctgggaggaccaggaaacagcctcagtggccagaggatcaccagtgcatccttcatcacagcatgtgcaatatgccaagattaccctcggtcattcctgtcaacaaggggtcaatgtcataaatgtcacaataaaacaatctcttcttttttttagtttaccccttggctttgtgttcttgcatggatttggggttggaggggccattccggaggctaaataaagtctcctggatttaaattatcctgggtctcttacttatggcttatgaaagtaccaaatgtataaccactagaagaaaatttaacatatgagtcgatcccttgttttatccattgaaagtagcagagtctggtgtcattaacctgacttgcttgtgagaaatttagattgtagagtcatttctgaaacatgacctaattcatcttgtgacttttaaatagtcttaaataccaagttcagtcattgtcttagagcacatgaatttcattataatagatttatcatgcccccctctcaaatatacacagttttggcaagccttaggtgttctgttccatttttttttcccctaaacatctttcgttagtcaatgctcatctaattacaaagggataatcccagactgtatccaattgctgtaacttttggtttcttaatgtcataatttttaaagtctgttttattttaagtgcaatattgagtatttagctgttaggctcaatccgtcgatatgaaataattttttaaatccctaagggcaggaaagcatttcgtggtagtgaaaataagaggaaataagatggcatgaaggtggtgggcggagaaactaggtaggacacaggaaagtgctctcaaaaatctttgaagagctcagctgaaaaaaatggagtagatttggctcatactattccggaaggcaaaaccagggtcagctgatgtcagccccagtttaatacacacggtcccaattatagagctactcactgaaagaatgggtttccttgcattgtggtgagctccctgtcacaagatagaagagtttcagtctaggcttaatggcaaccattggacaaagatgctttcttccacctaacaggccattaacatcttaaaggtatttttgtatctctaattttgtttataataggtgctcaacagaatgagctgaatggctgttacaaagggggtttgtaccttgggtaagagattaaaatataactcaaaatttccttctaacgctgcacctatggaaccatgtgatagaggtgtattaaaattgttatcgaagaatatatagcatatggtaaacaacagtttgcatatggaaaatgtctttgataatttaaccagaactgcattatattcaataacggattttctttataacaaacaacaggggaaaatggagttggcacacagtggatcactttgatatttttaatagtccaagtctggattttatttattcctgagccaacaattttgaacagcatattttccatgtttctgactgtaacaaaacattttcctcattgttccattgtaaatattcctcttgttggaactctttttaatcctgagatttaaacctgtacctttcaattgtctgtgacctttcaatttcactttcaatagttgaagaacttggctttgtaaatctctcagaagcttgaaaatatcttgtctctaccccctcagcccatttcatttgccaataattattttgtaagtagggttgaaatgaactcagctggccttgtgaaatgtttaaacttgcacaaacaactacatttttgttcaacaaatagcagtttactcagccaaaatcactttggatattgccattacaaatactgttaaacttcagaaatcatgtctgtaaattagatgagccaaaataaaggacaattgggttga

SEQ ID NO: 4 - protein, 977 aa, Homo sapiens
MAQFYYKRNVNAPYRDRIPLRIVRAESELSPSEKAYLNAVEKGDYASVKKSLEEAEIYFKININCIDPLGRTALLIAIENENLELIELLLSFNVYVGDALLHAIRKEVVGAVELLLNHKKPSGEKQVPPILLDKQFSEFTPDITPIILAAHTNNYEIIKLLVQKGVSVPRPHEVRCNCVECVSSSDVDSLRHSRSRLNIYKALASPSLIALSSEDPFLTAFQLSWELQELSKVENEFKSEYEELSRQCKQFAKDLLDQTRSSRELEIILNYRDDNSLIEEQSGNDLARLKLAIKYRQKEFVAQPNCQQLLASRWYDEFPGWRRRHWAVKMVTCFIIGLLFPVFSVCYLIAPKSPLGLFIRKPFIKFICHTASYLTFLFLLLLASQHIDRSDLNRQGPPPTIVEWMILPWVLGFIWGEIKQMWDGGLQDYIHDWWNLMDFVMNSLYLATISLKIVAFVKYSALNPRESWDMWHPTLVAEALFAIANIFSSLRLISLFTANSHLGPLQISLGRMLLDILKFLFIYCLVLLAFANGLNQLYFYYEETKGLTCKGIRCEKQNNAFSTLFETLQSLFWSIFGLINLYVTNVKAQHEFTEFVGATMFGTYNVISLVVLLNMLIAMMNNSYQLIADHADIEWKFARTKLWMSYFEEGGTLPTPFNVIPSPKSLWYLIKWIWTHLCKKKMRRKPESFGTIGRRAADNLRRHHQYQEVMRNLVKRYVAAMIRDAKTEEGLTEENFKELKQDISSFRFEVLGLLRGSKLSTIQSANASKESSNSADSDEKSDSEGNSKDKKKNFSLFDLTTLIHPRSAAIASERHNISNGSALVVQEPPREKQRKVNFVTDIKNFGLFHRRSKQNAAEQNANQIFSVSEEVARQQAAGPLERNIQLESRGLASRGDLSIPGLSEQCVLVDHRERNTDTLGLQVGKRVCPFKSEKVVVEDTVPIIPKEKHAKEEDSSIDYDLNLPDTVTHEDYVTTRL

SEQ ID NO: 5 - protein, 893 aa, Homo sapiens
MAQFYYKRNVNAPYRDRIPLRIVRAESELSPSEKAYLNAVEKGDYASVKKSLEEAEIYFKININCIDPLGRTALLIAIENENLELIELLLSFNVYVGDALLHAIRKEVVGAVELLLNHKKPSGEKQVPPILLDKQFSEFTPDITPIILAAHTNNYEIIKLLVQKGVSVPRPHEVRCNCVECVSSSDVDSLRHSRSRLNIYKALASPSLIALSSEDPFLTAFQLSWELQELSKVENEFKSEYEELSRQCKQFAKDLLDQTRSSRELEIILNYRDDNSLIEEQSGNDLARLKLAIKYRQKEFVAQPNCQQLLASRWYDEFPGWRRRHWAVKMVTCFIIGLLFPVFSVCYLIAPKSPLGLFIRKPFIKFICHTASYLTFLFLLLLASQHIDRSDLNRQGPPPTIVEWMILPWVLGFIWGEIKQMWDGGLQDYIHDWWNLMDFVMNSLYLATISLKIVAFVKYSALNPRESWDMWHPTLVAEALFAIANIFSSLRLISLFTANSHLGPLQISLGRMLLDILKFLFIYCLVLLAFANGLNQLYFYYEETKGLTCKGIRCEKQNNAFSTLFETLQSLFWSIFGLINLYVTNVKAQHEFTEFVGATMFGTYNVISLVVLLNMLIAMMNNSYQLIADHADIEWKFARTKLWMSYFEEGGTLPTPFNVIPSPKSLWYLIKWIWTHLCKKKMRRKPESFGTIGRRAADNLRRHHQYQEVMRNLVKRYVAAMIRDAKTEEGLTEENFKELKQDISSFRFEVLGLLRGSKLSTIQSANASKESSNSADSDEKSDSEEEVARQQAAGPLERNIQLESRGLASRGDLSIPGLSEQCVLVDHRERNTDTLGLQVGKRVCPFKSEKVVVEDTVPIIPKEKHAKEEDSSIDYDLNLPDTVTHEDYVTTRL

SEQ ID NO: 6 - DNA, 237710 bp, Homo sapiens
  source 1..237710: mol_type = genomic DNA
agttcggtgccagctgcgtgggctccagcttcgatcgttttccttggaatgctccaaaactcagcagcgactaagggaattccattggaatttgccgggcgtgctctcaccccgcacggcacccgcgccgtcagtcctcggatcccatcacttcagcccgaagattgcaactttgcaggtaaagaggatgtcgcctcggggctccgttcgaccggagctacacctcgccttctttctgggatctcggttaagtttcctaagctgcctgggaagccggctctcttctgggaggcggacatccctgcggggttaggagttcaaaaggttctggctatgtggtttctcttcaaggctcaggaaaaaaacctgtgaagctttcggtgcttgactcgggctgagcaggagtttgggggtgctcctcagtcttccgccgcactcggctttaaagcaggggagagggcgaggagtgaacccccggtgtgacttatatggtaaacaaaggagctgcagccacgccgtggtgctggggaatgtggccgtttttagccttttatgcatttggggaaaatggagatctcgggggcatctgggtgcatataagtgaggccttagctctccggcacttaaagtagggtaacgaaggaaggagagtgatcaatgttctaccgatcgattacattctgcgtcgttttcattctctgtcaagaaacagaaacacttttatccgtgttgcccgacccaggctagtgattcctagttcgcctggcaaccgagattccaatgaagccaatgaagccaatgacccggtttgctacttggttaaatcactgggattcactgcacaacttgttgttccagctgtgaagtcagctgtcttttgcgactagagacaagagaatactggaaaggcatcgagggtttaggagagctgaggaaagggatctcttatcttgtctgcctgcattcactatggtgtatccactatggtgtatccctgttcacatggcttcttagagaggcccttcccagtgaaattccatagctataaaatgcagcaagttgcttaaggagtaagcaccaagccaaaggagtaggaagagacagaaggaagctttagttgttttattaaaaaaaaaaatagacagacttgtaaaactttttcagttttaataaaacaccgcctctcagagctcatataatttctgcctttcctttcacagtacataatcacagcacaaagaatattacaaattctttaagcaaaaggtttactggagggttttttggtttggggtgtttttggtaaaactctaaattagacattgagagtaagagtgggtggagatgttaaaatgttgaaatcttcatcattgtgttgggtttgctatttaaagttacatttgtagcgcctactttcttattcacctggacactattgtccagaaaacatcctccttaaatgtttaaggggggaaaaaaaacaataagatcaatttcaatttacttgctcactggtcattctgaaagatatatgagttggaatagattttcattacttataacctttaaaattttgtaatggttatattatttatttttctgttgcacttatttccaaaaggtcaagataaaactgcattaaaaagtctatgacagagttaaagttctctttgaattttatagctattttaattattagaccagtaagagaccaaataacttttcatataaaataaccttaatcgattcatactgtgtattaataggaaataacagaagcaatctttatattctttctcattagaggaaattttaatgtcttattctatacacacatttcaaactaactttctaacttatgctccatggagaactacagccatctataggactgaaaagttacctgtttcaacatcctcatttaggaatccaaagctaaataaatattaaaaaacaacaacttatgtttataaactattacatcattttaattggtaaggaatctggaagttagattggctatttttcaatatttggatggctgtgtctatcaatatttttgtgaactagatgttgttataaacttcactgtaataactaagcttagaaaaattgctgtttctgaactgtagatgaaagatagaaacaatgacaatcattatttttaatttttcttttatgatttcaaagttataaacatctgatcatctagtcaaatgctatcagcataccctgtgataaagacaattacatttgtattgaaatataataaccccctttaagatgcactgattttaaccccactgaattaaaactacttttaagtgtatatttttggaaatagtctgttttatttttatacctgcatgtttaattgccaggattatttatagcaattcagatgatcagcattatatttagcagctgaaaactgaaataatttctcttttctgatcgatgcatatattggaacaaaaataaaaatatgcacacatttgttcaatagtaagtattgtaactatcagtgcttaaagttagtatagatatataagtaaagatagatatatgagaaatactaagcagtagctagaactataaaattagggactgaatattttatgaaaatatgattgttgtatttttgaaaataatgtcaggtaaagggaaaatacaataaactattaaattttcctttttccaaaaccatcattgccatatagcttatgaaatcaaattctaatgtgcactttgactttagaaattgaattgcctagactcaattggaaccagtgttattgacctctttaatgcctatggaaaccccaccatgattatttggttctcattaaaaatgaggttgaggagacagctcaaaataaaaactttgccttttcacctaatttataccctatacccgcccccccccacaaaaaataaacattaaaactggttcgactcaacccaaatttaattgggaatttgtttctatctagttataatgaagagttgatttagaactatctcactactcatgttttctatttctcacccttccagaggcattgaccccgcaatattttaagagatttgagaatattttgatcagggatataatatcatggctgtgtctttttaatcagcacaaatatagacctaatttttgagaacattagtattaccaaaataactttatgatgcaaaaaatgcatttagggaaagacaccatttgtttgggaaactgaaaattaaaggcatgcgcattgaaaatgtattaattcaaaaccttgtggtttcatgaactatttagcaaattaagtgctgtatttaaatgtttaaaaaatataagtgaccctcctgaaagttgtttaattttaatagaataagaaagaaatagtttcagaacttgatctactattgtaactaaactgtatgtaatatcctattaatattagtgtatgttttatctctctttttaaaaatatagcagtgtcatagaataatgacttcttgagagacactaagtgacacatggacacagtgttacatataaaattagaaatgttaattaaaacattaatttaaaaatatgccttgatagctttatctagcacactgcattctttttgagaaatgacagtgaaattaaatgaatcagatattcattaattatattctgtctgtggtttgctgttagattttgaaatatgttgaaaaattacttcaagcaaatactatcaagagttcaaatttacctgaaacaggacctattgtgaaaaaagaaaagagggaaaatgggccaatatttatgagaatttaatgtacacttggcactatgtgagaaactttgaaaaagaaagctatttttcattgttatcttaacatctaccttgaaactgaagtattatcacattttaacaacctgagaaagatgaaatttatgaaaatcacaaaattgctttgtgggaaggcaggatttgaagtatatcaaattttactatcaggtactacgtctacctgatggtaaagactacactctttttacttaattcctgtggtttctaaaatacaatcaataatcttttaacaagtttcataaattcattttttcagctatttgtttcttgaattttaaaaatattataacattggaatataaacaactgtccccatcatggggatagaatttgaaacaatagtctgttaaagttccatcagttttgaagcagagcaagagataagctacttatcttgagcaggatgatctcaaaatgacttcctttcttattcttaaatataaatctaatacatgtaaaaagaaaaaaaaagtttgtttttatgaacaaagttcaagattataattttttagaaatactcatgagcttataatttataaataaaaagttatcatgctaaccttttgaccatctgtaagctggtaataaaatgtctttattaaaaaaaaggtcatgctaggccatgttaggtttatactacatcttatcaatgttatgtaaaatttctagacaagtgtatttgttttagttttccctgaaattttaattttccaattattttaatgtcccttggtatttgagaggagctctcattcatgcatcccaaaagacatcgattagctgaatttgtcatgatatttactaaacatatatatgcatttgcgctgacaggattgtgtccaaaacctattgacattgaggttgaaggaatactttctttgaatatatgtactaccattacaaaagttatcactaaaatcttatccattcagtagatatttgttgaatattagtaaatgaataattgaatcaatagatgaatggcacatgcgtaagcttttcatttttgttgcatttcctggcaaagctccctctgtctagaataacttctacctttttgtttctgtaaaaatattctgcaggcactaaagcctagttagtgcctagttagtgcctagtttgtgcctagttaaatccaatatgaccgtatccttgaaagtttccttcatttctccagatgtcccaagtataaatacaagcaaagagcttgttatattctgtcttgcaggctggcaaagatctgtctccagatctagacagtaaactttttaaagaaaaccggaggattttcaaaactgtgtgagtttgtaactgaattagagtgccataaatactatgcttcataattgacataattaatgtattttatactttcataatattgtacttggctaaacttttagcatatttttatataatgatgccaattgtgataatgttgcacttatacaatatattgagtaccatattatttcttatgttacaaaaataatttacccaccattattcaataaacttaactttcagtcagctacttactctataatgctcatttttataggatttatataaccagttattaatgtgtttcagtttaagtggtactgtgccagaattcttaaaggagggcttttgttccattacactatgagaggagtagttagagttgaaagaggacagatacaagtgtttctcaggaatgcttactgaactaaagaaagccagagacttctttggagtgatatttggaaagtaagttgagagtgcatttcaaagacttgacaatacatgatgttccattgtgggtggcatgagggatttgttttaaattattttcattctacttcattgacaatagagtttttacaaatcagattatgaaaagtgttcagatactctgccacatttttaatgcatttcatctctaaatgatagtggagaagtaacacaatttgcataccgggatcatagttcataacacattgtaatttttattttcacagaattagtataatagtgctgactatgtgctttttgaatagatgagtgaaataaatgaatgcatagatgattgaattggtctgtcatcagctgctatgctcaacctctttaacacactgttcattcaagtagctgatcatacaccaatatgaatctccaaaaacacaatggagggatgagaggacaggcatagtgtacatggagtgaagaacagagaatctatcatgatttatgtacaatcatctccatcatttatgacagcatgagtttctttttatgtaaagatccctttcattctaaggtaaagtgaagctgcatgccctgaatcacactgaggtcacactttaaatgaatgctcttttgtggtagttgcagtttgacaagcagagttgggtcttctttaattttatctagagcccaatatgtacaggaatataatatatatgtgtatacaacatacatataagtatatatgtgtaaacacacaaacatatatgtaataacagtaaataacaagtaataaagagtgggagactgcttgagtgtgagacacaaattattatcaaatagtatagagtaacccataaaggaccacagtatttgtttttgaatatgtcagtgtccctataaaatggttagatttgcaatgaatgacttggaagatcatcttatttaaaagtatgtttgtaagtaggccccctaaatctttctatatgatcatgcagtcatacatcaaatacgtcctgagaaaggcatcattaggcaatttcatcattgcacgaacatcatggagtgtacttacacaaacctagatggtagagcttactacatacctaggctatatggaatagcctatttctcctaggctacaaacctgtgtagcatgctactgtagtgaatactgtgggcaattgtaaatatacaatggtaggtatttgtgtatttaaacatagaaaaagtacagtaaaaatacagtattataatcttatgggcccaccgtcatgtatatagttcattgttgcccaaaatgttgttatgtgatgcgtgactgtgtatttctctgtctacacatacgcacacatacacacacacacgagcacacactttactgaggtcttaatacataacagtcactctgctagattctgaggatacagagatgaacaagacatattttcctttttctttaatattttaagcaaagtttgttcataagcctcttatcacactccagtgtcctgtattatctaaaacatatttggcaaccttattttctcctgatcctttcccatgacaactctgaactcattaaataaataacataaattatattacaatgagtagagtctatacttgacatttaaaagacaaaacaaaacaaaacaaaaactttgggccatggtggaatcaatctaaatatatcctttttgccactaattactgttttccgtaagagtaggacttaagtttttttactgtaaatccgtgttaaatttaaatagcattattgacactattaaaaacagtgttttccttttatacatagatattaccaaattaccattcacaggctatgtattgtaagaggtaagttgttttccaaagtctggttggatttttggtgttacagtcacatgttaccctaccccacatggaaccaatgaagcaaacctaagaaggcacttttatagttagggatataatgacctggattctcaccaccctacccctttctctagagacagtagagaccttggcttaagagattcttagaaggtcagatcaaatttagagaaatctaggagtactcagggcccactgttagtgttttcttgtgggctcctctgtctacagctacgtctatcgaaagcctagaaatagactacctttctcatggcctttaatcttgaaaatgaagaagggactggactagatacattcctcctttttaaaaaaaaccattattggaacctgcattcctaggtctaccaatggtaccagaatgttttgctttctgagggttatcatgcaaaataattagagtgcctacctctaagcatctgagagcctctaaaataaaggataaagaacatttaaagatatgtccctctgcatgtgctgtataaaaagagatgctggcactggggaaagcgttatttgcttatctggttcattttaacctcacagcttaacattttgatttgtaatgtgcaagctacttggagctgaactgcacatttttatttagcactccagcacgttcttggaacaaagtgaaccagcaaatgattttgccctttcatgaataaaagaagctttaataaataacatttcattataacagtatttatgataaatatttttccatcatataaaaatgtcaacaattttaacctgaagaataagaactgctttgcattctattgtatttagcaatgaaccactaaaaccagaacttaaagcagaacttgctggtatacttaagtactttcttatcagttactacattgctgtaattgaaatattgtatataattaaaaaatgaaaattgcccatttttagattaatagttaatggcaataattattggcaacatcaaatgcagaagatctgtttttaaattaaacattttagcctctgatttttttaaaaatgtaaatatctacaaagtaaatatacaacccaattgagaaaaagtaaacaaattgaacacttgcaatgatcaatttttgaataacttagtatatctgaagcatataacctaaatcatttcagtttatctaaatgaagttttttaaaagataatctactttcttataatgcttctggttttgagagtcacaatgagatcttttcatctttgatatataaaaggattattgtcaaatatttaatgtgattaatgagactctactcataaaatacactggaattcaatttattttagaagtgtttcaggttctgcctgaaattcatctggattactttaaatataatgaaatagatacataagtaaaccgaagacagcgactgctcaaagcgtttcacataccctttgtttcttcaatattatactctgctagcactccatcagtcctacaaatgggaattttcaattgtctaattggatctaggattggaggcttatgacagaggagctgccgtatatgaattcacattccctgctgcctcaaccatagtagggtacttccatatgtaggtggtgcatatggtgaaaatccatatttatgcacatttataaaattgtggtaagattatgttttcatagtgagatggaattataaccttgattgaattatgccttctgatgaaatccaattactgatttatttgttctccataggttggacatagacatttcttcctagtctatgtaagaaaattttatatgaagaaaggcttaaacaaaaaggttttaagaaaggagatttcaggttattacattgttcctttgtgtacagaaaaggcacattgaatttagtctgttgtgcttcagaaaaatgatctattgttctctctatggcattatgaagataatatcattacatgattcgtggtgggtttgagtgttttacactaaaatgagtgctcaatataatcctaaagaaaaatattaaaaatattcaccatatgaatattttcaaatgtcctgtctaaaataacaaaatacttgatatattactgatgttgttaatcattgttaatagtttattttaaaaacagtttaacattttaattttaatttatgcaataagtactttcagttcattttcctaaactcttaccagtatggtattttgaaagtgtttgctagttaccagaaatataagtgtaacacaaaacaatgcaaaatatttatccatatgtttgatgagctatttttgtcttcttaccctaaagtaagttgaaatacatcggaggatggtatgtttatcttttaaaatatataatttctatgcaccaacacatgtgcatggaggtgggggtggggagcctgagctggatagatgattttttattttttcagaagtaatgattagtatgttttattttctattttagttttatttttaatttttataatcacagatatcacagatgtttttctagatgacatctattccttctagtaccaacatgtatcttgacagattaagagttctctttagtacacatttcattgtatgttgactatgaattttttatttttgtgtgattgaaatgtttttgttttaacctcacttttaaagttactttcattagctagagtattctaggttggaaattcatttcatttcggtactttcaaaatgctgttaaattgactttcaacttctaccatttctgttgaaaagtcagctgtgagtctgatgatgctctttgaggttaatgtgtgttttctttttgctgtttttatgttttctcttactcttttattatcagcagtcatccaattatgtgtctagatggtgtccttttatttctactgtttgacatttggaccattttcaaagcatggcttcctgtctttcattactttcagaaaaattttggtcactatctctttagatatagctttgaccttcattttttccttcttaagacctccaaataaagatgtatgtagcttttcacactatgtcatgttctagtaaactgtactttttcttttaatgctttttccatttatttttgttctctgtgttgtaatctgtatattttatttacagctctcttcccatttatgaatcctcttttttcaccatgtcctatctgtaaactgatttatttattcattttgtatattttttatttttaattttttgtgtacatagtaggtgtatgtatttatggggtacaagagatattttgatgcaggcacgcagtcagtaataatcacatcatggaaaatggggtatctgttcacttgaccatttatcttttatgttacaaaccatccatttatgcccttttagttatttttaaatgtaaagttaaatgagtttgactttagtcacagttgtgatatcaaatactacatattattcattctttcaaactattttttgtgctcattaactgtccccactccctctcaacccccattacccataccagcctctggtaatcatccttctactctttatctccatgtgttcaattgttttgatttttatatcccacaaataagtaagaacatataatacttgtctttctgtgctgtctctctgtgtgttcacttaacataatacctccagttccatccatgttgttgtaagtaacaggatctcattcttttttatagctgaatagtacttcattgtttatatgtaccacattttctttatccattcatctgttgacggatacttaggttgcttacaaattttgactattgtgaaaagtactaagacaaacatgggagtgtagatatcccttcgatatactgatacgttttattttgggtatataccctgcagtgggattgctggaattgctggatcatacagcagctccatttttagttgtttgaggcatctccaaactgtttttcattgtggttgtattaatgtacattcccacccacaatgtatgagggttcccctttctccatatcttctctagcatttgttattgtctgccttttgaatagaagccattttaactggggtgaggagatatctcattgtagttttgatttgcatttctcttatggtcaataatgttgggcaccttcttgtgtgcctattttccatttgtatgtcttcttctgagaaatatctattcaaatcttttgcctgtttttgatcagattattagatttttacctatagagttgtttgaacttcttatatatactaattattgaacccttgtcagatgggtagtttgaagatattttctcccattctatgggttgcctttttactttgttgattgtttcttttgctgtgcagaaactttttaacttgatgtgatcccatttgtccatttctgctttggttgtctatgcttgcggggtattactcaaaaccttttttcccagaccagtgttctgaagcgtttctccaaagttttcttgcagtggttttatagtttgaggtctcagatttaaatttttaagccactttgatttgatttttgtatatgatgagatttaaagatctagtttcattattctgcatatggatatccagtttcccagtatcattattgaaaagactgtcctttctccagtgtgtgtttttggcatctttgttagaaattagttcactgtgggtgtgtagatttgttactgtgatctctattctattccatttgtttaagtgtctgtttttatgccaaaatcatgttgttttggttactatagcattatagtataattcaaagtcagtaatatgattcctccagttctgttatttttgcttaggatagctttggcgattctgggtctttgtggttgcatatacattttagaatattttttcagtttctgtgaagaatgtcattggtattttgaaagagattgcattgaatttttagatttctttgggtagtatgaacattttaccagtattgattcttccaatccatgaaaatgaaatatctgtccatttttggtgtcctttttaatttttttcatcagtgttttatagtctaaattgtagagatctttcatttccttggttatttcataggtatttatttttatgtgtggctattgtaaatgggattactttttatttctttgtcagattgtttactgttggcatatagaaatgctaccaatttttgtacattaattttgtatcttgcaagtttattgaatttgtttatcaattctaatagttttatggtggaatctttaggtactatgttgaataagagttatgaaagcgggcatccttgtcatgttccagatcttagtagaaacactttcaattcttccccatttctatgatactagatgtgggtttgtcatatattgcttttatcatgtgaaggtatattgtttctatatgcagttttttgagagtttttatcatgaaggatgttgaattttattaaatactttttcagaatcaattgaagtgatcatatggtttttaccctttagcatggtttaaccctttagtttatatgatgtatcacactgattgatttgtgtatgttgaaccatccttgcattgcagggataaatccaacatggtcatgatgaatgacctttctaatgtatcatttaattcagtttgctcatattttgttggggatttttgtctcaatattcatcagagatattggcctgcagttttctttttttttaatgtgtctttgtctggtcttggtatcagggtaatactagccttgtagaatgagtttggagttattccctcctcctcagttttttggaatagtctgagtagtatgggtatcagttcttctttaaatgtttggtagaattcaacagcgaaggcatcagatcctgggctttttttttttttttttactaggagactttattattacagctttgatctcattacttattattggtatagtcaggttttggatttgttcatggttcaattttagtaggttatatgtgtccaggaatttgtccatttcttctagattttagaatttattggcatgtagttgctcataacagccactgatgatccttgggatttctgcaatatcaattgtaatgtcttcttttccatttctaaatacatttatttggatcttctctcttagtcaggccagaggtttgtcagttttgtatatcttttcaaaaaacaaactttttgtttcattgatcttttgtatttttctcttaatttcaatttcatttatcttgtctgatctttattatttctttttttctactaattttgggtttagcttgctattgcttttctagttctgtaagaagcatccttaaatcatttatttgaagtttttcctctttctgatgtaggcacttacagctataaactttcctcttagtactgctttagctgtatcccatatgttttggtatattgtgtttccattgtaatttgtctcaagatatctttcaatttccttcttaattactttattgatgcactggtcattgaggagcatattatttaatttccatgtgtttgaatagtttccaaaattcctcctgttattgatttgtagttttattccattgtgatgaaagaagatgcttgctattacctcaattttttgaatgttttaagacttgttttgtgacttaacttatggcctgttcctgagaatgatccatgggctgaagcaaggaatgtatattctgcagattttgggtaaaatgttctataaatatctattaagcctatttgtcctatagcacaagttaagtctgatgtttctttgttgatattctgtctgggaggtctgtccagtgccaaaagtgggatgttgaaatctccagctgtgattgtattgaggtctatctatctctttaataacatatgtttttctatctgggtgctttagaattaggtgcatatatatatatatatatatctacattgtatatatctacatgtgtatatatatatatatatctacattgtatcctgttgctggattgactcctttgatattatatagtgaccttctttatctcttcttacagtttttgtcttgaaatctattttgttagatatatgtgtagctactcctgcttgcttttttaaaatttccattggcatgtaatatctttttccaaccctttattttcagtctatgtgtatctttatagtagtgtgtttcttgtaggcaaatagaacatggggctttatttttttatccattcagccatactgtgtcttttgattgaaaagcttattctatttacattcaaggttgttattgataaatagagacttactctacagccatgtgaccctgaattcacccaatctcatctgatcttggaagctaaacagggtcaggcttggttaatacttggatgggagacttactcctaccattttgttgttttctgattgctttgtggccttctcttccttttttactgtcttctttccatgaaggtagttttctatggtgttatgatttaagtttttggtttgtattttcagggtatctgttgtgtgattttcaattcgaagttaccatgaggcttgcaaatattatcttataatctggtattttaaattgatgacaatactgattgcataaacaaacacacaaaaggaaaattaataaaaactccacacttagctttattcctctgctttttaactttctattgtttccctttatgtcatattatactgtctacataacaattgcagtgttatggtattctgtgttttactgtgtgcttactattaccagtgagtttttatctttagatgattcttttcttgatcatcaacaccattttcttttagattgaagaactttctttaacatttcttgtagaacaggtctggtattgatgaaatccctcagcttttgtttgtctgggaaagtctttacttatccttcatgtttgaaggatagttttgctggatatactattctaggataattttatttttcgttcggcactgtaaatatgtcatgccactctctcagcctgtaaggttttcactgaaaagtctgctgccagacatactgggactcacatgtatgttatttgtttcttttctcttgctgcttttaggataatttctttatccttgacctttgggaattcaatattaaatgtttcaaggtagttgtctttggcttaaatctgctaggtgttctataaccttttacttgaatgttgatatctttctctaggattgggaaattcttggatattacccctttgaatatactttctatccctatctctttctctacttcctctttaaggccaatatccattagatttacccttttgaggctattttttacatcttataagcatacttcatttttttattattttttcttctgtctcctttgactgtgtattttcaaatagcctgtctttaacctcaccaattcttctgcttgagcaattctgctattaagttactctgatgcattcttcaacatgtgaattacatttttcaactctagaatttctgcttgattcttttcagttattttaatctctttgttaaatttatatgattggattctgaactccttccctgtgttatctgcaatttctttgagtttccttaaaacagctattttgagttctctgtatgaaaggtcacatgtctctgtttctccaagattggtccccagtgacttatttatttcatttgttgaagtcatatattttcctgcatattcttgatgcttataggtgttctttgctgtctgaccattgaacagttaggtgtttattgtagtcttcacagtccagacttgtttttgcctatccttcttgagaaggctttccagctattcacagggacttgggccgcaagcccaatatcactgaaatttttgcagacttgtaggggtcctgccttggtggtctttaataagatctgtagtaattctctggattaccaggaagagactgttattcatttacctcactttcaggtaaacaaataagagtctctttctttctgggctgacccagctggaactaagggtatggttatgcaggcacttctgtggccagcagcactagactttgttgggactgacctaaagccagcacagcactgggtcttgcccaaggcctgctgtaactgccacctggctaccacctatgttcactcaaagtcctaggcctccgcaatcggcaggccaggtttttattcttttccccagggcagtgagattccccaggctctcggtgactccagagatggtttctgaaagtcagggattagagtcaaaagtcttaggaatttgcctgatgttccattctactgcagctaaggtgaaagtcagaccacaataggaagtccttcccactcttccttctccttttcacaggcaaaggagcttcatctggtgggcatcaccaccactggcccatggtggagttctgccaggccactgctagtgttcacttaatgcccaagagttcttcagacagcttgtggtaaacgctgcacagcctgggactcacccttcaaggtagcgggctcccttctggcccaggacaggcctagaaatgctaggagcccgggcctggactcagggaccccaagtgcctgcttattgctctgccccactgtgtgcaagctggtacctaaggtgcaagaaaatttcccctttacttttccctctgcttttctcaaatggaagtcttttataatagccaccattgctgggaatcttctgggtcacatctgaagccagcatgtctcagggcccaaggcccattgtgtactctctggggatcgttgcaggttattcagtgcccaagagctctttagacagcaggtgatgaatcttgccagaactggattgtttcataaaagcaatggatttccttttggcccagagtgtgtctagaaatgttatctggagctagggccttgaatgcctctgcccagtaccctctcctactgtggctgagtaggtatccacaatacaagacagagtcgtctttactctttactctccaccccctaagcagaaggaaggggacacttttgttcctgtgagttgcactgccttgggttgggggaggatggcataagctcttcttcagctgccccagctgatgtctccccaggtcacatgtcaccttagtcctctggttctgagtccagcctagcactaggaattgtagtccttgcattctagactgcctttcacatttacctaggaccccagagcactttggcccatgatggcaagacttgtccagaaacttgagttctgaccactgggataggcaattcccacctggctaggtctagttcaaatgctccctctgtgcacaggcactggctgagtccagcaaggcttactctccactattgcagggcagcactgagttcaaagtaatgtccacctgttgctgtgctctccctcctccaagtgcacagactttcctcatgtttagccactgccataggataggggaggggtggtatcagcaattaagactgtctctcagaccctcctcaatgcctctttcaatgatataacattaaaaccaggtactgtgattgctcacctgatttttgtgtcttgtgatggtacttttctgtgtgcagataattgttataatttggtgttaggaatatgaatggtgtaggcttctattccatcaccttactccaccctcttaaaccaatttattgaattaataatttcagttattgaaatttccacttctagtatttccatttgatttattttcttatattttaggtctcataaaatttttaaaatttctcatctaatttctcaatattcttgaatatcatatttagtagaaagtctgaggctgataactccaataacagggttatgtgctggtctgtttgttaagaatttttaaattaaaatgtctcatacttttttatttaaaagtgaaaaatgtgtatcaagaattgtagaagttttgttatcttcctttagagaggatacatcctgtctactggaaagcaaatagggtaagagtaaatcatctaatccaatcacaggctggaatgactggagactaattttaaaattttacaagactctatgtattccttgtatgaccctgttcctatgttgtaggacctgtggggcctgtgggccttgactttttaataaggtcttttcttcctgcagagtccagaataataaattttatcttctcatttgtgtgtgtgagattgctgaatattctgccctaattttcagcagctttctgataagcattttacttctctctctgcaaacaataagattttaacaaatgccttggtgtggcacatacttttatctgtatgccttttcaccaggacgtgggaattacgtgttcttgttgccttgacaaatgccttgagagcaaatatggcttgtacaaggtcaattcatttctgtgtggtttccctctatctgggatgttggctccacaagtcctagctagctctgcaactcttctttaagaaaagttaatttattttcatatttatttatatttactcagcttgtctaattgttttcagaaggagtgttaattcactacatataatttaatcacagtcaaaagcataagctcttcttttatatcttaatttttatgttgaaacatttagtcaaaatgtttaaaagaaaaaaattatattcttatggcacagtagagatatataattgtacccatagagagatgaatatagcaaaacaaaaatgttttagaatctttagccagtgcttttttattgtcacagaagtaatattattcttgccaaattaccatctttcacatcaggaattaaacaaccatttaaatctattttgtataaaataacaaattgtagataaaactattaatctggcacaaattacttgtaactgagttccaactaagagctctttcttatttaatagcaaaaacattattaactgaacaagaagtagaggcagtagcaatttgacctctgcttcattgaggtgacatttttcaggcctatggttttctgagtaatccccatttctattatttcatgtccattataaaaggattggaaggtgctacagctcactactgcatgtgttacagttttcactgttttcactaaaattgcctataaatcttgatagaatatattttattaaagatgctctgcagatgtgggaaacactgtattagaccagatcacatgattttaagatatcattcaaaactgcctgtgagacattgtttctgatttaaccatcagtattgttgcagcttatggttaatatatcgggtagttttcatataatccaaattagacactatttactctgtgagatgtggattatttgtcttctgtgttgtttctaatgtgcactgtaattttaatctgtgccagatgatgcaggagtgaatgagagaaatgccatcttcccaacaccgatgaccatgattggctcccaacacagcacggtctcagctccagcctgatcaagtaaaagttaggttgtcagtgctgaacattctgaggctggagaatccaagtttgtgttttttgtttttgtttttgttttccacaatcccttccagtttaagatctgttttaggcacaatgagatcctgttggacggtctgagtgaaaattcatttaggtttgttcagaagttagcgtggatttagataaaattctagactcagtggctgcttggtcatgtccaagaagggaggtttccatttgtattttgggctgacatccttaatctgtccctcaacccaaagtctgatgacttggttttgactttgttcctcaacactacatctaccaccatgggaaggagtttattgcatggtcaaaaacaagcttcaggagaacgcacctcacagccagtcatcctttccattggaatatcttagtcacaagcacctagattcatccaagttgtttttttgtatcaataacttattattgtttattgctcagtagtatttgatggtatagatgaatcacagtttccatgtcagttgggacaatgacataataagctagatggcatagtaatccagaatcacatttcacctctgagatacccttctatgaagggcgtgagcctccatggatgcatacccagcctccttcccaggaagctcatagatttcatctgactgtgggaatctaggtcctggcaatgggctgtagtgggacctcagcaagtctcttgtcacatctggagaaaaagataatcaagcctgcttaacagctgtagggtaccatctgcaggactttaggcatattatctatactcaagatagttttgaaggaagagaagatgttgagaatctcttaaactcagccccaaaagatcacctcatttctacttcatagacctacaaaagcatgttagttcttaattctttcaaacttcagtgctttctttactccccacataccttttatatttgacagaaaggcattattccactttttcttcatgagtactgatgaccaggaccaccttctcacagatttccctggtctgcttgaagttgttcttgataataatttcagtaaccttttgatcatctcctaactaggcttgcgtttctccagatgatgggatgagggtgtgtgtgtgtcatattggagagacctactttgctccgattctggtcttctcagtggaaacttcaagctcacttctgtctgcaacttgattttccctctatctatgtgctcttacaagcatcaaaaatgattatgaatgaagaaataagtcaggaatcggaattccttcccctccagttttccttcactgcctgctatctctttttgtcataatgttctatggatggtgctgtgatagcagttggtatacaatggtttttatattaaagttttttgatggacaaaaagatatactgtacatttttactattgatattatttttgattgataaatcataattttatgcatttaagatatttaatgtgatgtcttgatatatgtatacaatgtataatgtctatgttaaactaattaatatattaatcaccttatttatctattttctttatggtgaaacatttgaaatgtactctattacagatgctcctcagcttatgatgggcttatgtcctgacaaactcatttaagttgaaaatattgtaaatctaaaaggcaaactcatgtaaagttgaaaaatcataacttgaaccattgtaagttgtaggccatctgtactttgaaatgtagcatacattattattaagtataatcactcttatgtgcaatagatcccaaaaccttatctcctatctatctgaaactttgtactgtttggtcaccacctccccatttccttcagcttccctgcttatcctctggtaaccatcattctactctatttctgtgagttcaactttatgagtccactgtatatatttgtggacttcataaggtccactttatccatctataaatgagatcgtacagtatttgtctttctttgcttggcttatttcacttagcataatgttctccatgttgttgcaaatctccacttcccctttttaaatatttattttattttcattaatcattgaggcagaattgtacatattcatggggtgcattgtgatgttctgatacatctataaattttataatgatcaaattagggaaattaggatattcatcaacttaggactgcctttgctccattccataggtttagcatgttgtgtttccattttaatttgtctcaaggtatttttaaatttcctttttgatttacactatgacctgttggttatttaggagcatgttgtccaatttccacatgcttgtgtattttcctagattttttcctattattgatttctaattttatatcattgtgctctgaaaaaccgcttgatatgatttcagttctcttaaatttgttaagatttgttttgtggcataatatgtgatctatcctggagaatgttccatatgcacttgagaagaatgtgaatcctgttgctgttgagtagaatattgtagatatttctgtcaggtacgtgtgatctaaagtataattcaagtccatgttcccttatttattttctgtctagatgctctatttttaaaagtggagtatcgaggccccctattattatagtatctttctttagataatttaataattgctttatgtatttatgttctcagatgttgggtgcatatatatttacaattgttatctcttcttggtgaatcaattcctttattattatgtaataacctttttgtcttttaaaaataacatttgacttaaagtctattttgtctaagtgtaactactcttattctcttaatttccatttgtgggaaatacttttttccaatcatttcacttttaatctgtgtgtatctgtactagtaaagtgagtctcttataagaaaatatggttggatcttgttttttaatccattcagccaatctatgtctttttattgaagaatttaatccatttacacttgaggtaattactggtacataaaaacttgttgctggcattttttaatttgttttttgattattttatatgtttttttttcttcctctctttctgtcttcatttgtggtttgatggttttctgtggcggtatgctttgaaccctttctttgcatattttgtgcaactactgggggtttttgctaagtgggttaccaggaaatatcctgtaacagactactttaagctggtaacaacttgcttttaattccatataaagactctacactttcacaaccccacacatactttttattaatttaatgccaaaatttacattcatttttgtaatttgtatttcttagcaatttattgttgctgcaattatttttaataattttgtcttttaattctcctagtagagataaagttgctttacacaccacccttacaatattagagaattctgagtatgaccacatattacttctaccattgggatttatttttaattttaaaatgttattttaattattcattagtagcctttcatctcaccttaaagaactacttttagcaattcctataaatcacgcctagtggtgatgtatgctcttagcttttgtttgtctgggaaagtttttatttctttctcatttctgaaacatagctttatttggtaaagtattcttggttggccatttctttttattccttcagcactattaatatagaatttgcctctcttctggcctgaagtgtttctgctgacaaatctgccaaaagccatattgtgcctccactgaatgtgatgtttcttatcttttgctgctttcagtattatttctttgtatttgatttttgataatttgattataatgtatcttggtgatgtcctctatgggttgaatttgattggcaacctgtgactgagatgcctgtacctggatgttgttgtctttccccagatttgggatatttttagctattattttctcaaatatgctttctaggcttttttctctttctttttcttcatgaattcctactatgcaaaagttagtttgctttatggtgttccataattcctatagaccctcttcattctttttcattcttatttatttatttatttatttttgctcctctgatcgattggataatttcaaatgtcctctgagctcactgatctacttgatcaagtctgctattgaaactttctatttaattttttagttcactttttgtattctttagctccagaatttatggcttcataattttttattatttatgtttctttgcaagcttctcattttgtttataactttttcccaaattttacttgattttctatctatattttcttggaatttcctgaacttctttgagtagtgttctgaattttttgttagtcattttatagatctccatttcttctgggtccatcagtagagctttattaacttcttttggtggtgccatatttccctaatttttcatcatcctcatgtacttacattaatgcctccacatttgaggagatggctatttcttctagcctagtctagcttaaaaattctagatgagacagcttgtagcgaccccaaacagaccttaaggttgggttctctaattagactgggtggattcttgtgctctgaatttgaatggtatttctaactgttctccatggttcagtgaggctactatctggactctgccatcaagtagagctgctggctgggctctgcagtcatctctgatcagacaggtttgcaggttgtcttccatggctgggtggcactgctatttgaaatctgcagttgggaagggccatttgctgggatccaaggctggtgaagtacctaggattgctgcttggtcacagaagtaggcagagccagaggctatgctttacagatgtgcatggacttagacttgcctgctggcttaatgtgagctgaagaagagtatcacggttttgtggagttactggtttacatgcagttgctggtttttggcagtactagatgatctattcacgggtactcactgacctgcatttgcctctcacctagaaaaagcttaacgagagcatctgggctgggtggaaaagctggctagggattcaagcctgaaagatccatgaactggcgtggagcagtggctcacacctgtaatcccagcactttgggaggctgagacaggtgaatcgcctgaggtcaggagttcgagaccagcctgaccaacatggcaaaaccctgcctatactaaacatacaaaaattagctgggcatggtggtgcatgcctgtaatcccagctacttgggaggctgaggcaggataattgcttgaacctgggagatggaggttgcagtgagccgagattgtgccattgcactccagcctgggcaacaagagtgaaactctgtctcaaaaaataaagaaagaaaaaaaaaaagaaagacctgtgaaccatgtttcctgtagtgtgatgctgtcagctagtctctctggtttgacaccattatcagcccaaatatagagtaactaccaaggtctgcaagctggtcactattagctctatctctgttctttgtttctaactaaactcaggtaatctagccatgctggcatttccaatgtttcccatgggatgagacagatatcagtctcctgaaagggttccaaaattgtagggaaacttaatgtttgcttccaacttatttttcctactgtagaaactgtgggttcaggaaaaatcttagtgtgtgttcctgtgccagcttgggagaggggtggcacaatcaaggagaatcattcatcttaccattgggatcaaaattttctcagtgctttggtccaaagaaaggagtgtccttgactcacttccaaggtgtgggatattcagaattatcttcttgcctgcggatagttgctggttagatttctgtggtaggtaggagagagtgaagctggagaactcctattctgctgtcttgctaacacactactctgtgtgtgcatgtgtgtatgtgtgcgtgtgtgtgtgtgtgtgtgtgtgtcaccaaacatcagttgaagacatagttctgtaacactatacctggacaccctcaggactgaaatcatttttgtgccattaagcagttgatatattaacactactgggttcaattttcttgagtattttgtaaagaatcacatactaaatgtaatatcttttctgcaaaccttcttctagtctctagttttgtgttactgcattgaaacttaaagtcacattacaatccccaaaatacataattgtcatgctaagttgctaactgacttttaatgattctgtaattccaaatagctaaaagcatgtgaagtttaaggagctccaataatggctataactaggttttccaactttcttctgaaaatggtagcaaagtaacaaagttaacatttgatgagtgactagtctgtggttggccctatgctgaatgatttacttgcattattttatattattaccctcataaaacatcatcattcctactatacagatgacaaaactagttctagaatggttaaataactttctaaggtcacacaattagtatgtagtacaaccataaattcaacccaaacttcacaaattccaaagccaagtttattaaccattgtgctataatgcaagtttgaagtctggaacatcttcatgtactcatattaatcactgagcagcctttgtttttcttatcagccttagcaggtatgatatcttgtttccaagcttttaaaagctttatagcatttgctaaagtgttcatttttgaaggactagatttaattacagctgtacagcgtctaggaaaatatagcatccttactcttttcgttccatttctcatccttatttatcaatgtctggtttcaaaaagctctatgacctgaatatttccctctaaaaatttatatgctgaaatcttaaccctgaaagtgatggtattaggaggtgaggcctttggaaagttattgggtcatgaggggtctacccttatgtgattagtgccattacaaaagttccctagagagctacctgctcctttcaccatgtgggaacacagcaagaaggtgccatctatgaactagaaagttgggcctcaccagacttgccgctaccttaatcttgaacttcccagctttcatagctatgagataaaaattttgtgccttataagccactcagtctatagtacctatttcaatacaacagctacagaaacaaagataggaagaatcaccaactctttctttttctttttaagaatatttgaattgtgtttattctaagatctgcccccgatttatacttttccttttcctttttttttttttttttttttttttttggctagacgctatcattaattgctagaaaccactaatgtgttttccatctgtataaggttttttttttttttttgagattgagtcttgctctgttgcctaggctggagtgcagtggcgagatctccactaactgcaacctctgcctcctgggttcatgcatttctcctgcatcagcctcccgagtatctgggattacaggtgtatgccaccacacccagctaatttttgtatttttagtggtgatggggtttcaccgtgttggccaggctggtctcaaacccctgacctcaagtgatccacccaccttggcctcccaaagtgctggggttacaggcatgagccactgtgcctggccataagttttctttttctttttgagactgtaatataaataaaattttatgattttaagatgtctgtttgaatgtaagtcttcatttatctgggatacctgtccagagtataatttaattgttgagtcacatgatagtggcatgcttcatttttaaagaaactgttttttagagcagttagttgtaacattttgcatacctgctaacaatgcatgaatgatttagtctgttcacctcctcaccagcatttagtgtcattactatatcttattttagccatttttatagtagtgatatctcattgtggcattattttgtatttctacaatggctaatgatgttaaacatcttttcatgtgcttatttgtcatctatagatcacctttcagtaaagcttctctttctgttttttgaatattttctaattgtttttatttagtgttaaagttttatatttctttatgcatcctagatattagctatttattagatatgggatttgtacatgttttcaagtctgtagcttgtcatttcatcctcttaactagaaatgtttaaattttaatgaaatctaacattgatatttgttcttttacaccacttttatttttaaaaaggaaaaggtaaggaaccgagaaaacaaggatttacccaaatttttgcaggaaagaaaatcaggtttttgcttcattaattgcttatagtgaggtgttcaatagatgggtatgccaaccatcttttccctattagcttatccctagactattcttatttctgttgatatacagatttagcataaaatattttcttgtataatcttgattaaatccttacttgctcattgtgatcctctgtaaatcacctgttattattataaacaagcacaatttcaactacttttaaattttattttatattattacaaaagtattgagaatgcatcagttttaaccaataatataaaatttttggctttgtgctgattagaattaggtgggtttgtgttgaattctatattcaaagtgaattaattacttgaatagcaaaaataataccattaggaatgacactgaatttgtagagaaggaaattgattcctagaccagaacttggctctgcaatgaacaatattaatatggttattttagtgtaataaaatttattgttttccgatgatagactcaaatcaacaaaagatggaaggccaacttttggtggctgaacatgctgggaatgttataaacttgaaaatgtaaaaataaatttatagttcactaatgttagaaagtagctgttaaaatgagactagaacattaaacaggaatttattaatctttttaaataataatattataacatatataacagtttggaacatataaaactgcctatatttgataattttgcctataaaaatgttgacttcatatgattaaagttaatactaaaataattatcaacattagagggaggagatagagaatgatgagaagggatggtataagtgaatgaagtcttcatgattctggcaggacattgatataaaagggtctaaggaatcatattaaaagagttttcctacaaagattatcctttatagttattacatttattataccaattaaattcagtttgtaactgtctaaatacttttaaacaaactctttcaaacacatctttgaataataattgtactaaagatttttcatttttttattaccctcctcatttgcagcattgcctttctacagcccattggctgaaaaacctagaaagttgtgccagatacctaacaagagaaacactaaagaaggagaattaaataattgatgtgatttattctgtaatcaacctctattatattcaatttgatatatcttcctggagtttccactgacataaccagtaaacaaattttcagaggaaaacacaaaaaatgcatattattttctgcttgcaaaaattctgtttagagtaaaatttgtgtctgaaaattaattattgatgatccaataaaaggatcatgtttcagacccaaatgtgattgtttttacagtaaattatggcaggaggatagaatacttggttgatggaatattagggttaacagcatttgagaaaaataatagcatgataatttttctgtgacagacactttcacaatgtctttcatttgacttgtctgaagccaccccaatttttctaggggagttgattaaaagcctcagatttgatgctacatagattccagtttgaatcttgatcctcatattcaggagctgagtaacctagtataagttacctaatatctgtaatccccaggtttctcatctataaactgaaactaagaatatctatctgacagtgcagttggtaagatatagaaaataaatcacaatgcttggtacataatgatccctcattaaatgacaggataatatctaatgatttattattgaaaccgaattattaaaattgagttaaagctctcaggtggtttccaaattgattgactgtaactttttcattgatatcatgttctctttaatgactagagacatagattaaccctggatgtgcctgtattataaaacaagtaatgtccttgactctgacgatggtatctaagctttaaagaaagagatgtaattagagtgcaaatttggaggccaggaactcatcacctttactatagtccttactacctggttttcggtagagcaaggactccacaaagggggagaacagaggaaaagcaggcacatgatggctctaggagggaatgcgaatagctacaaggtatcaaggcatcctgttggtagaaatccctgggaattcctcttggtactgccctagcagtaataaaatatcaatactactacttgtcaatattgatggagcatatactatgtagtcactacgttgaaatctttctgaatattatttaattctcagactaactttataagatatatataagagcatgatatcagatgtaccagagtccatctcagctctatctcttagtagctgtgtcaccttggtagattatgtaactccttgaggactcttttcttcttctgtaaatggggaacttttcttgataattataatcgtggacagaagtactgaggcttaagaaagactcaagacctcccagcaaagcaagtatatgcaaatgtagaatatggttttaggtgtatatatattcttaactttcctttaatgcttctctctatacaagagtaagaatatacctaaaatatggtacatagagaagtgaatattgtgtatatattgattagagtcagggcaagtaaaaggtaaatttagtacaatggaatcattttgatacttttgattttaaaataggtaaaagttctaaatttttacttactaaaaaagaaatcatctgagttatttcattcaaatgacatattttagtaattattaagtgcaagacagtatttatatggactgtgtgaacaagatcacttatgaaaaaaaaatatcctgtggtcgactttaactctgcctttgtgacttgtacttcagtgtgtctgtttttataaaaaggtctagaatcaaaatctgttactgtcaaactagagttcatcagattgctaggctatgccccaaagtgttggattagtgggtgagaggtagagcatgtgaatttgcattcctaataagttcccaggtgacacagatactgctgatctggagaccacacactaagaacagctggctcagatcaatggttctctattttaatgttgcagtatttccatgtggttggataagaagtttggaatatgtgttagtccattttcacactgctggtaaagacatatctgagactgggcaatttacaaaagaagtaggtttaatggacttacggttccatgtggctggggaagcctcaaaatcatggtggaaggcaaggaggaacaagtcacgtcttacatggatggcatcaggcaaagagagagaattcactcagggaaactcctccttctgaaaccatcagccctcgtgagacttatccactgtcacaagaatagcatgggaaaaatttgcccccatgattcaattatctcccactgggtccctcccacaacatgtgggaattcaagatgagatttgagtggggacacagccaaaccatatcatgccacccctggctcgtcccacatcttatgacctcacatttcaaaaccaatcatgccttcccaacagtcccccaaaatcttaactcatttcagcattaactcaaaagtccacagtgcaaagtctcatccaagataagacaagtcccttccacctatgagcctgtaaaatcaaaagcagcttagttatttcctaaatacagtgggagtacagacactgggtaaatacagccattccaaatgggagaagttggccaaaaagaggctacaggccccatgcaagtctgaaatccagtggagcagtcaaatcttaaagctccaaaatgatctcctttgactccaagtctcacatccaggtcatgctgaggtaagaggtgggttcccatggtcttgggcagccaagcctttgcagggcacagcttccctcctggctgctttcatgggctggcattgagtatccacagcttttccaggcacatggtgcaagctgttggtggatacaccattctagggtctggaggaaggtggccctcttctcacagatccactaggtggtgccctggtagggactctgtgtgggggatctcaccctacattttccttttgcactgccctagcagaggttctctatgagggccctgcccctgtaacaaacttctgcctgggcatctgggtgtttctatacatcttctgaaatctaggtggagatttccaaaccccaattcttgacttctgtgcactggaaagctcaacaccatgtgggagctgccaaggcttgaggcttgcaccctgtgaagccatggcctgagctctatgttggccccattcagtcatggctggagtggctggaactaaagtcaccaagtccctaggctgcacacagcacagcgactctgggcctggcccattaaaccactttttcctcctaggtctctgggcctgtgatgggaggggctgccatgaagacctctcacatgtgctggagacattttccgcattgtcttggggattaacatttggctccttgttacttatgcaaatttctgtagccagcttgaattcctccccaaacaatgggattttcttttctaacacattgtcaggctacacattttccaaacttttaggctccattttccttttaaaactgaatgcctttaacagcacccagtgctttgctgcttagaaatttcttccagcagataccctaaatcatctctctcaagttcaaagttccataaatctctagggcaggggctaaatgccaccagtctctttgctaaaacataacaacggtcacctttactccagttcccaaaaattttctcatctccatctgaaaccacctcaacctggatttcattgtccatatcactatcagcattttgggcaaagccattcaacgagcctctagggagttccaaactttcccatattttcctgtattctgagccccccaaactgtcccaacctcttcctgttacccagttccaaagttgcttccacattttcaagtacgttttcagcagtgtctcattcttggtaccaacttactgtattattttgttttcatgctgctgataaaaatatacccgagactgggcaatttacaaaagaaagaggtttaatggacttacagttccacatggctggggaagcctcacaatcaggcagaaggcaaggaggaggaagtcacatcttacatggatggcagcaggcaaagagagagaactcgtgcaggagaactcctctttatgaaaccatcagatctcttgagacttattcactatcatgagaacagcatgggaaagacttgcccccatgattcaattacctcccactgggaccctcccacaatatgcaggaatttaagatgagatttgtgtgggggcagagccaaaccatttcagtacaaataattcattattaaatataaactagaaattttgagaaaagaagtaattaaatgttagagcatatttgtatttacccttgttatattgttcctgatgtattaaccaatatattgggaattgtgcatacgagtatgctgtacatactaatgtcatgcaccttatgtgttgaatctaaaaataagcttgagaatagctaggatacaaaacatttgttatcttcctctttttttggctactcacttataccttttatctttctttgtcactgtcatgtcaaagtttccagtgacttctgctacgtcactgtctgcacacgtcttcctttctctactactcctgtcagtatcttgggtgttctcagtagctagtaagacagagaaggaggaaagacatgtgacaggatatgcaagaataaagaaacccatggtgtttgtacagcatcataaagatgcaagagcaagaaagatgcaagtagcaagatgttggacaagagtgcaggtaaagcgtgttgcctttagcagaaacaagcatacatgaaccattaataccagagagagaaatggctgtgaatggaggacactggacattcataggtcatattttacaatgaacgccctcagaaggaggaagtagtaattttttgaaggcatgaagttaaaatgaaaagttattaagagccaccgaagagaatgaaacagtcagccgactgaagcaagtaaaactgactaccaactttgaaaggataattgttgctagaaaacaggtttcatattggcaaacattccaatgtgcttttattttgttttgttttgtttttcttccatcgacaatatgcaggatttaaaaaaaaaattaaaaaaaaaaacaggctgggcctgctggtggttcatgcctgtaatcccagcactttgggaggccaatacaggcagatcacttgaggccaggagttcaagaccagcctggccaacttggtgaaaacccatctctactcaaaatacaaaagttagccaggcatggtggcacatgcctgtacccccagttacttgggaggctgaggcaggagactcaagaatcacttgaacccaggaggcagagattacagtgagccgagattgtgctgctgcactccagcctggggtgacagagcgagactctgtctcaaaaaaatgtaataaataaataaataaatggagagtgagataaactcaagattgatccaagtatgttggagaaaccagagtgcatctcatttactgtactcatctaaaggttctgtcatggaaactatgtcaatgagaaaacataacacaataagtatggcaagaacatattcttgcatgtcagaatttagttgggaatttatgaggaaagtaatctttttcaatgtgacaagtgtttgtggtttagagttcatagaaaataattttgaaatagcttgatcatttttgacccactttcagtaatataattcacacgtaaacaaaaacccagtgggcaaagttttgattctttaatgtattaagtaggaactttccttaactaaaaacataaaatagtcaaaatcaattgaaagtacatgtgacttaaagtattcaaaaacaacacataatttaggttaggaaacaattagaatttggaaggatgcataagagtgaaaaaattaaatgttttgtcaatattgtactcagagtcttgaaaagaagatagctatgtagaacatttataaacagtgtttatgttttaagtgaaatatgtgccgaaatttatgtaatatctgggacagatagactattggcatgaactcatattgcagtttctgaatatgtcacctgatgaactaaatttatgtgaaaaatgcaaatatagcatgaagataaatagtattccaatgaataaaaaatattaaggtatcatgatttattagctcagttatagaaaatgcaagtataaccgctacacttgatagcagtttcttgtttgaagataaaactgtactgtcagactactcttcttagctaaaatacaaagacaataaaaaaatttaaaaactatatcctccatttttttgttaaaattagaaaacagctaagatcctggaaagccaaatgggtggatggttttgtgaaggctgaatgaagactgagtaggatgcattgagaaaaggccccacaaccacagatctcctaagagtccagctaaattattcttctgacagttgaggcgcaaaaccccgagatgccagaaatatcttacttcttaccataaaattaggtttgcaggtgcatctgcaggtggcagctgatgttctagacccaaaggcaaggctaagtaaagaaccactcacaggaagcacagtctgtctctttgacagagcaggaggagagtatcttttcatttttaagatcgtcagctgcccatcttcactagtaggaaagacgttaacagctaagtgaattaatgggcaaaactctgtatcctaagaatatgcccagatggttgtgaaagtcgttgtggtacttttcaatcaggtgaatgccgtatcaaatagcttgtccaagcaaaacttcttttagataatttttttttctataactgagctcataaatcatgagttcaatgatgagttaagaaagaaaaagtacagaagctttagaaatataatgcaggaaaataatcagaaaaaattggcagaaaataaaataggagatgaagaatgcatgccagaaacatagaatgagaagcagaagaaaatggcattttactatgaatttttaaaaatctctgtgaagcaaaagcaccaaatcaataatgaaggagcttaggaagagataaacaagaaaaaagaactatgaactggcagagtgcagcaaggaaatgaaataaataaaatgaatccaggaaaagagagaaattataagaagcaggactcgatactgctgaaaacaaagtaatagacatagtaggataaataaaaacacatctaacatgaaaatagtttagcataaagtttttaaagggtttagaggttaatcaatagatacatactgtagttttctattgactagagttagcatggtgtgccctttccacctttttacttttaactgttatctttacatttaaagcatatattttgtaaacagtatatagtttgatcttattttttattcaatataaacatctctatcttttccttgggtgtttataattttaaatttttgtaattattgattttaatatgtcctgttcgttagatttaattgaatcatctaactattcgattcctatttgtttcatgtgttctttatttacttgttttggtcttctttcagataaattgagtttttgttgttgttgttgttgtttttgacggagtcttgctctgtcacctaggctggagtgcagtggcatgatctcagctcactgcaacctctgtctcccgggttcaagagattctactgcctcagcctcctgagtagctggggctacaggtgcaccgcccagctaattttcttttttatttttagtagagtcagggtttcaccatgttggtcaggctggtcttaaactcctgacctcaaatgatctgcccgcctcagcctcccaaagtgctgggattacaggctacagcgcgtggccaaattgagtattttttagtgatctaattttctctcatttgttggcttaaaaacaacaatatcgtgtcatttaaaaaattattttactgtaatttacaaataatgattgcatatatttgtggggtacaatgtaatgttgtgttacaaatataccttgcggaatgtttgagcaggctaatcaatatatttattacctcacctacttatcatttctttttggtaagaccatttaaaatatattcttttattgattttgaaatatacaacacattgtaaaatatagtcaacatgttatgcaatagatcactataatctattcctcctgccttaactgaaaccttgaatcctttaggtaacatctcccctttccccactccaccctcctgccagactctggtaaccaccattctactctctacttctctgagcttgactttttcaggttccagctataagtcagatcatgcaagtatttgtctctctgtgctcggattatttcatttagcataatgtccttcatatacatctatgttgtcacaaatgacaagatttacctttttataatgctgaatggtattctattgtgtatgtatacagcatttttttctttatccattcatccatttatatacacttaggttgattccataccttgactattgtgaataattctgtaatgaacatgggaaggcaggtgtctccttgaaatactgatttcagttcctttgagtgtatacccaggagcagtactgctggatcttatggtgattccattttgttttttcgaacctccatactatattccaaaatgactgtacctatttatattcccaacaacagcgtatgaggatttccttttctctacatccttgccaatactagttatctttcatcattttgataattgatattctaacagatgggaggtgatacctcattgtaattttaatttgcatttccctgatattagtgatattgagcatttttcatacatctactgtttatttgtatgtcttcttttgagaaatgtctattcaagccttttgcccaatttttattagggttgtttgttttcctattattgaatgtctgggcaatgatttcttgaatatgaccccaaaagcacaggcaacaaaagcaaaaatagatgcatcaaatgtgaaaaaaaaattcttctgtacagcaaaagaaacaactaacagagcgaagagacaaggcaaaattgggagaaaatatttgcaaatcttatatctaataagagaagaacatctaaaatagataagaaactcaaactatgatttcatttttaaatttttactttagtttatatactttaacttttcacagtctgccttcatatgatatgatactacttcctatatagtaaaagaaagttaaaacattacgcttacttttctccccttctacactttatactattatattatatatatatatatatacaaaaaatatatactatatattatataaatgttatttataccaccatagatttttaaaattatttttgcttaagcagacttttttttttttaaaacggaatttcgctctggttgtcctggctggaatgcaatggcatgatctcggctcactgccacctctgcctcccaggttcaagtgattcttgtgcctcagcctcctgagtatctgggattacaggcatgcaccaccatgccaggctaattttgtatttttagtagagacggggtttcaccatgttggtcaggctggtcttgattgaactcctgaccttaggttatccgcctgcctcagcctcccaaaatgctgggattacaggcgtcagccatcatgtccagcaagcaattctctttaaaaagaatttaaataatattaaataataaataataacaacatgtttatattcattcatgtacttaaccattttaatgttttatttattttttcctatagatacatatttctgtgtgttttctttttctgtgtaaaaaacttcctttaatatttttaatggtgcagccagctggagggaaattttaccacatttatgtgctgaagcatgcttatctcaactttttaaaaaattaacatatcatttttaaatgatcaaaatataattcacataccataagactcacccttttaaaatacacaatttaatagtttttaatatagtcatcatgttgcacagacctctaatttcagagcatttttgtcaccacaagaagaaaccccatagtcattagcagtcactcccaattcttacccactgcactcagccccatccaacccctggcaatcactgatctactttcttttcccatggatttacctattttgtgtatttcatataaatggaataacataacatgtggtcttttgtgtctgacttccctaacttagaataatgtcttcaaggttcatctgtgttgtagtacgaactagtgcttcaaatttttattgctgaatgacagtctattatatatatatatttgattttaccattcatctgttgatggactttatgttggttccaacttttggctattatgaacagtgctactataaacattcacgtacaaatttctgtgtgacatatattttcatttaatttgagtgtatatctagaagtagaattgctgggtcatgtggtaattctatgtttaatttttttgaggaaccactgaagtgtttcccaaagtggctgatccaactggttttattggttcccaatccaaccagcaatgcacaaagattcccatttcgcctcgtccttaccaacacttgctattttctgggttgttttctttttgtttttgttttaattgaagctatcccagtgggtgcaaagtggtatctcattgtggttttgatttatatttcactaatgacttatgatatggagcatgtttgcatgtgcttaatagccatttataatctttagagaaatgtctgtttatattctttgcacattttttaaaaaatctgaatatttgcctttttatatttgaggcttagttgttctttttatattctggacacaagacctttggtagacatgatttgcaaattatttttcattctgtgtgttgtcttttactttcttgatagtgtccttttaaggaaaagcgttttaattttgataacatccagcttatctattttttctttggttgcttgtgatttattgtcatatgtaagaaatcatggcaaaatccaaggtcttcgggatttatacctatgttttcaataagaattgtatagtttttagctctttttaaatttttttcttaacttttattttagtttcaggggtacatgtgcagattgtttatataggtaattgtgtgttgtgtgagtctgatgtacaggtaataagcacagcacctgataggtagtttttcaatcctcaccctagtcccaccaaacaccatcaagtaggccccagtgtctgtttttcccttctttgtttctgtatgtactccatgcttagctcccacttacaagggagaagatgtggtatttggttttctgttcctgtgttagtttgcttaggataatggcctccaggcctaaccatgttgctgcaaagaacataatctcattctttttcatagatatgtagtattccatggtgaatatgtaccacattttctttatccaatctatcattattgggcatttgtgttgatttcatgtttttgctattatgaatagtggtgtgatgaacatacacatgcatgtctttatggtagaataatttatattcctttgggtgtatgcccaataatggaatgggtgtgttaaatggtattttgattttaagttctttgaaaaatctccaaactgctttccacaatgccggaactaattatcattccaaacaacaccgtataagcattcccttttctccacaacctcgccagcatctgttattttttggctttttaaaaataaccattctggagggggaggagccaagatggccgaataggaacagctccggtctacagctcccagcgtgagcaacgcagaagacgggtgatttctgcatttccatctgaggtaccgggttcatctcactagggagtgccagacagtgggtgcaggtcagtgggtgctcgcaccatgcgccagccgaagcagggcgaggcattgcctcactcgggaagctcaaggggtcagggagttccctttcctagtcaaagaaaggggtgacggacggcacctggaaaatcgggtcactcccacccgagtactgcacttttccgacgggcttaaaaaacggcccaccacgagattatatcccgcacctggctcggagggtcctacgcccatggagtctcgctgattgctagcacagcagtctgagatcaaactgcaaggcagcagcgaggctaggggaggggcacccgccattgcccaggcttgcttaggtaaacaaagcagctgggaagctggaactgggtggagcccaccacagctcaaggaggcctgcctgcctctgtaggctccacctctgggggcagggcacagacaaacaaaaagacagcagtaacctctgcagacttaaatgtccctgtctgacagctttgaagagagcagtggttctcccagtacgcagctggagatctgagaatgggcagactgcctcctcaagtgggtccctgacccctgacccccgagcagcctaactgggaggcaccccccagcaggggcacactgacacctcacaccgcagggtactccaacagacctgcagctgagggtcctgtctgttagaaggaaaactaacaaacagaaaggacacccacaccaaaaacccatctgtacatcaccatcatcaaagaccaaaagtagataaaaccacaagatagggaaaaaacagagcagaaaaactggaaactctaaaaagcagagcgcctctccacctcgaaaggaatgcagttcctcaccagcaatggaacaaagctggatggagaatgactttgatgagctgagagaagaaggcttcagacgatcaaattcctctgagctatgggaggacattgaaaccaaagtcaaagaagttgagaactttgaaaaaaaattagaagaatgtataactagaataaccaatacagagaagtgtttaaaggaggtgatggagctgaaaaccaaggctggagaactacgtgaagaatgcagaagcctcaggagccgatgcgatcaactggaagaaagggtatcagcaatggaagatgaaacgaatgaaatgaagtgagaagggaagtttagagaaaaaagaataaaaagaaacaagcaaagcctccaagaaatatgggactatgtgaaaagaccaaatctacgtctgattggtgtacctgaaagtggtggagagaatggaaccaagttggaaaacactctgcaagatattatccaggagaacttccccaatctagcaaggcagggcaacattcagattcaggaaatacagagaatgccacaaagatactcctcgagaagagcaactccaagacacataattgtcagattcagtaaagttgaatgaaggaaaaaatgttaagggcagccagagagaaaggtcgggttaccctcaaagggaagcccatcagactaacagcggatctcttggcagaaaccctataagccagaagagagtggggaccaatattcaacattcttaaagagaagaattttcaacccagaatttcatatccagccaaactaagcttcataagtgaaggagaaataaaatcctttacagacaagcaaatgctgagagattttgtcaccaccaggcctgccctaaaagagctcctgaaggaagcgctaaacatggaaaggaacaaccggtaccagccgctgcaaaatcatgccaaaatgtaaagaccatcgagactaggaagaaactgcatcaactaacgagcaaaatcaccagctaacatcataatgacaggatcaaattcacacataacaatattaactttaaatgtaaatggactaaatgctccaattaaaagacacagactggcaaattggataaagagtcaagacccatcagtgtgctgtattcaggaaacccatctcatgtgcagagacacacataggctcaaaataaaaggatggaggaagatctaccaagcaaacggaaaacaaaaaaaggcaggggttgcaatcctagtctctgataaaacagactttaagccaacaaagatcaaaagagacaaagaaggccattacataatggtaaagggatcaattcaacaagaagagctaactatcctaaatatatatgcacccaatacaggagcacccagattcataaagcaagtcctgagtgacctacaaagagactttgactcccacacattaataatgggagactttaacaccccactgtcaacattagacagatcaatgagacagaaagtcaacaaggatacccaggaattaaactcagctctgcaccaagtggacctaatagacatctacagaactctccaccccaaatcaacagaatatacatttttttcagcaccacaccacacctattccaaaattgaccacatacttggaagtaaagctctcctcagcaaatgtaaaagaacagaaattataacaaactatctctcagaccacagtgcaatcaaactagaactcaggattaagaatctcactcaaaaccgctggactacatggaaactgaacaacctgctcctgaatgactactgggtacataacaaaatgaaggcagaaataaagatgttctttgaaaccaatgagaacaaagacacaatataacagaatctctggaacacattcaaagcagtgtgtagagggaaatttatagcactaaatgcccacaagagaaagcaggaaagatccaaaattgacaccctaacatcacaattaaaagaactagaaaagcaagagcaaacacattcaaaagctagcagaaggcaagaaataactaaaatcagagcagacctgaaggaaatagagacacaaaaaacccttcaaaaaattaatgaatccaggagctggttttttgaaaggatcaacaaaatagatagaccactagcaagactactaaagaaaaaaagagagaagaatcaaatagatgcaataaaaaatgataaaggggatatcaccactgatcccacagaaatacaaactaccatcagagaatactacaaacacctctatgcaaataaactagaaaatctagaagaaatggataaattccccgacacatacactctcccaagactaaaccaggaagaagttgaatctctgaatagaccaataacaggatcagaaattgtggcaataatcaatagcttaccaaccaaaaagagtccaggaccagatggattcacagccgaattctgccagaggtacaaggaggaactggtaccattccttctgaaactattccaatcaatagaaaaagagggaatcctccctaactcattttatgaggccagcatcattctgataccaaagcctggcagagacacaaccaaaaagagaattttagaccaatatcctcgatgaacattgatgcaaaaatcctcaataaaataatggcaaaccgaatccagcagcacatcaaaaagcttatccaccatggtcaagtgggcttcatccctgggatgcaaggctggttcaatatacgcaaatcaataaatgtaatccagcatataaacagaaccaaagacaaaaaccacatgattatctcaatagattcagaaaaggcctttgacaaaattcaacaacccttcatgctaaaaactctcaataaattaggtattgatgggaagtatttcaaaacaataagagctatctatgacaaacccacagccaatatcatactgaatgggcaaaaactggaagcattccctttgaaaactggcacaagacagggatgccctctctcaccactcctattcaacatagtgttggaagttctggccagggcaattaggcaggagaaggaaataaagggtattcaattaggaaaagaggaagtcaaattgtccctgtttgcagatgacatgattttatatctagaaaaccccattgtctcagcccaaaatctccttaagctgataagcaacttcagcaaagtctcaggatacaaaatcaatgtacaaaaatcacaagcattcttatacaccaacaacagacaaacagagagccaaatcatgagggaactcccattcacaattgcttcaaagagaataaaatacctaggaatccaacttacaaacgatgtgaaggacctcttcaaggagaactacaaaccactgctcaatgaaataaaagaggatacaaacaaatggaagaacattccatgctcatgagtaggaagaatcaatatcatgaaaatggccatactgcccaaggtaatttacagattcaatgccatccccatcaagctaccaatgactttcttcacagaattggaaaaaaactactttaaagttcatatggaacaaaaaagagcccgcatcgccaagtcaatcctaagccaaaagaacaaagctggaggcatcacactacctgacttcaaactatactacaaggctacagtaaccaaaacagcatggtactggtaccaaaacagagatatagatcaatggaacagaacagagccctcagaaataacgccacatatctacaagtatttgatctttgacaaacctgagaaaaacaagcaatggggaaaggattccctatttaataaatggtgctgggaaaactggctagccatatgtagaaagctgaaactggatcccttccttacaccttatacaaaaatcaattcaagatggattaaagacttcaacgttagacctaaaaccataaaaaccctagaagaaaacctaggcattaccattcaggacataggcatgggcaaggacttcatatctaaaacaccaaaagcaatggcaacaaaagccaaaaatgacaaatgggatctaattaaactaaagagcttctgcacagcaaaagaaactaccatcagagtgaacaggcaacctacaaaatgggagaaaattttcgcaacctactcatctgacaaagggctaatatccagaatctacaatgaactccaacaaatttacaagaaaaaaacaaacaaccccatcaaaaagtgggtgaaggatatgaacagacacttctcaaaagaagacatttatgcagccaaaaaacacatgaaaaaatgctcatcatcactggccatcagagaaatgcaaatcaaaaccacaatgagataccatctcacaccagttagaatggcaatcattaaaaagtcaggaaacaacaggtgctggagaggatgtggagaaataggaacacttttacactgttggtgggactgtaaactagttcaacaattgtggaagtcagtgtggcgattcctcagggatctagaactagaaataccatttgacccagccatcccattactgggtatatacccaaagtactataaatcatgctgctataaagacacatgcacacgtatgttcattgcggcattattcacaatagcaaagacttggaaccaacccaaatgtccaacaatgatagactggatgaagaaaatgtggcacatatacaccatggaatactatgcagccataaaaaatgatgagttcatgtcctttgtagggacatggatgaaattggaaatcatcattcttagtaaactatcacaagaacaaaaaaccaaacaccgcatattctcactcatagatgggaatcaaacaatgagatcacatggacacaggagggggaacatcacactgtggggactgttgtggggtggggggggagggatagcattaggagatatacctaatgctagatgacgagttagtgggtgcagcgcaccagcatggcacatgtatacatatgtaactaacctgcacattgtgcacatgtaccctaaaacttaaagtataataataaaaaaaaaaccattctgattaatttgagatggtatctcattgtggttttgatttgcatttctctaataatctgtgatgttgagccttctttcacatgcctattggctttgtgtatgtcttctttggaaaagtgtctgttcatgtccactttttaatggggttgtttgtttatttcttataaatttaagttacttatatattctggatattagacctttgtcaaatgcatttttttcaaatattttccccattctgtaggttgtctgtttaatctgttaatagtttcttttcctgtgtgaagttctttggtttaattaggtttcatttgtcaattttgtttttattgtaattgcttttggcatcttcatcacgaaatctttgccagggcctgtgtctggaatggtatttcctaggttatcttccaggatttttacagttttgggttttacatttaagtctttaatctatcttgagctgatttttgtatattgtgtaaggaaagacccagtttcaatcttccacgtatgactagccagttatcccagcatcatttattgaatagagagacctttccccattgcttgctgttgttaactttatcaatgaccagatgaatgtaggcatgtggctttatttctaggctttctattttgttccattgctctatgtgtctctttttctaccagttcaatgctgtttcagttactgtagccttgtagtatagtttgaagtcaagcaatgtgatgccttcagttttgttctttttgcttaggatttccttggctatttggactcttctttggttctatatgaattttaaaatagtttttctaattctttgaagaatgtcattggtaatttgataggaatagcattgaatctataaattgctttgggcagtatcctattttaacaatattgattattcctattcatgaacttggactatttttccattcatttgtgtcatctctgatttctttgagcagtgttttgtaattcttattgtagagatctttcacctccctggtcagctgtattcctaggtatttgtgtgtgtgtgtgtgtgtgtgtgtgtgtgtgtgtgtgtgtggctattgtgaatgtgatttcattcatgatttggctttcagtttggatgttgcttgtgtataggaatgctattggtttttgtacaataatttaatatcccaaaactttgctgaagttgtttatcagatcaaggagcttttgtgcagagactatggggctttctacatatagaatcatgtaatctgcaaacagaaatagtttgactttatcttttcctatttggattcattttatttctttctgttgcctgattgcttgggctaggtcttccagtactatcttcagtaggagtggtgagagaggacatccttgttttgttgcagtttttaaggggaatgcttctagcttttgcccattcagtataatgtttgctgtgagtctttttagatggctgttattattttgaagtatgttccttcaatgcctagtttgttgagggttctgactatgaaagatgttgaatttctttgaaagccttttcttcatctatggagataatcatgtgatttttatttttagttccatttatgtggtgaaacacatttgttgatttgagcatgttgaaccaatcttgcattgcagggataaagcctacttgatcattttggatttacgtttttatgtgctgctggattcagttggctagtatttgttgacaatttttgcatctatatttgacaaggatattgaactgaagttttattttttggttgtgtctccgtaaggtttgggtgtcaggaggattctggcgtcatagaatgagtaagggggagtctcctcttcaattattgggaatagttttagtaggaatggtactatttctttatatctctggtagaatttcactgtgaattcatcatatcctagacatgttctggttggtaggatttttattactgattcaatttccaaacttgttattggtctgttcaggaattccatatcctcctggttcaatcttgggaggttgcgtgtttccaggaatgtatccatttcttctagggtttctagtttgtatgcataaagctgtttaaaatagactctaaggaattttttgtatttctgtgaggttggtggtaatatatcctttgtcatttctgattgagtttatttggatcttctctcttttatatctttgtctagctagtagtctatcaatcttattttttctttaaaaaacaaactcctggatttgttgatcttttgtgtggttttttacatctcaatttcctttggttcatctctgattttggttgtttattgccttctactagatttggggttggctggcccttgtttttttagttcctctaggtgtgatgttaggttgttaatttgacatctttttttgtttttttttttaactttcattttaagttcagaggtacatgtgcaggtttactatataggtaaatttgtgtaatgagggttcgttgtacagattattttgtcacccaagtattaagcctagtacccattcattgttttcctgatcctctccctcttccaatcttccccaatttgataggtcttagtatgtgttgttcccctctatgtgcccatgtgttcttatcatttggctcccacttataaatgagaacatgcaaaatttgatttcctgttcctgcgttagtttgctaaagataatggcctccagccccatccatgtccctgcaagggacatgatcttgttcttttcatggctacatagtattccatggtgtatcacattttctttatttggtctatcattgatgggcatttatgttgatgccatgtctttcctattatacatagtgctacaataaacatacacattcatgtgtcttttattagaataatatgtattcctttgagtatatacccagtaatgggattgttgggtcaaatggtgtttctgtctttagatctttgagaaatagccacactgctttccacaatgcatgaactaatttgcactccaaccaacagtatataagcatttctttttctctacaacctcaccagcatctgtaatttttttgctttttaataatagccattctgatggtgtaagatggtatctcattgtagttttcatttgcatgtctctaatgatcagtgatattaagctttttttcatatgcctcctggccacaattatgtcttttttgaaaagtgtctgttcataaccttttcctattattaatggtttttaaaaattttttttcatatgcttgttggccacatgtattttttttaattgtactttaagttttgggatatatatgcagaacgtgcaggtttgttacataggtatacgcgtgccatggtggtttgctgcacctatcaacccatcatctacattaggtatttctcctaatgctatctcttcaatggcccccaatcccctgacaggccctggtatgtgatgttcccctccctgtgtccatgtgttctcattgttcaactcccacttatgagtgagaacaaacaatgtttggttttctgttcctgcattagtttactgagaatgatggtttccagcttcatccatgtccctgcaaagaacatgaactcacccctttttatggctgcatagtattccatggtgtatatgtgccatattttctttatccagtctatcattgatgagcatttgggttggttccaagtatttgctattgtgaatagtgctgcaataaacatacatgtgcatgtatctttatagtagtatgatttataatcctttgggtgtatacccagtaatgggattgcggggtcaaatggtatttctggttctagatctttgaggaatcatcacactgtcttccccaatggttgaactaatttacactcccaccaacagtgtaaaagcattcctatttctccacatcctctccagcatctgtcatttcctgactttttaatgattgccattctaactggtgtgagatggtatctcattgtaattttgatttgcatttttttaaagtgcctgtttacatcctttgtgcacttttggggtttttattttttttcttgaaatttatttaagtttcttacagatgctggatactagactttgtctagtattctcccattctgtaggctgtctgttcacgctattaatcattttctttgctatgcaaaagcgctttagtttaattaggtcccatttgtccatttttgcttttgttgcagttgcttttgacatcttcatcataaaatctttgtacgttcctgtgtcctaaatagtattacctaggttgtcttccagggtttttacagttttgattattacatttaagcctttaattcatcatgagttgatttttctatatggtgtaaggaaggggtccaatgtcaatcttctgcatatggctagcctattatcctagtgccatttatcaaataggacattgttcccaattgcatgtttttgtctgatttgtcaaagattgaatagttgtaggtgtgcagcctttttttttggttctttattctgttccattgttctatgtgtctgcttttgtagcagtactatgctgttttgattaccgtaaccctgtaatatagtttgaagttaggtagcatgatgcctcctgctttgtttgtttgtttgtttgttttccttagtattgccttggttattcatgctcttttttggtcccatgtaaattttaaaatagttctctctactaccctgaagaatctcaatggtagtataataggaatagcattgaatctataacttgctttgggcaatatcaccatttttaggatattgattcttcctatccatgaacatggaatgtttttccatttgtttgtgtcatctgtgattcctttgagctttgtgctttgtagctctccttgtagaggtctttcacctccatggttagctatattcctagatattttattctttttgtggcaattgtgaatgggattacattcctgattttgctctcagcttgactgttgtttgtttatgggaatgttagcaaattttgcccattgattttgtatcctgagactttgcggaagttgtgtatcagcttaagaagcttttgtgctgagactatggagttttctagttaaaggcttatgttgtctgcaaacagggatagtttgacttcctctcttcctatttggatgccttttatttctttctcttgcctgattgctctgtccaggatttccaatactgtgttgaataagagtggtgagagaaggcatccttgtcttgtgctggttttcaaggggcatgtttccagcttgtgccatttagtaatatgtgggttatgggtttgtcagagatggctctttaatttcgaggtattttccttcaatatctagtttattgagcatatttaatatgaatgagtgtttaattgtattgaaagccttttctgtgtctattgagataattatgtggtttttgtctttagttctgtttatgtgatggatcatatttattgatttgcatatgtaccaatcttgcatcctagggataaagcctacttgatcatggtggattagctttttttatgtgctactttattctgtttgtgactattttcttgaggatttttgcatcaatgttcttcaaggatattggcctgaaattgttgttgctgtatttctgccagattttggtatcaggatgatgctggcctcattgaatgagttagggaggagtcttttctcctcaaatatttggaatagtttcagcagaaatggcagcatatgtgccatgtcacgatgagaagaatgtatatcctgttgttttggctggagagttctgtagatatctatcaggtccacttgaatcagtgctgagtttgggtcctgaatatctttgttaattttctgcctcagtgatctgtctaatattgtcagtgtgtgtatctaagtctctttgaaggtctccaagaacttgctttatgagtctgggtgctcctgtgttgtgtgactatttaggatagttagctctttttgttgacttgaatcctttactattatataatgcccttccatgaattcgacatatttctaacgttttgatgtgtgcttttagtgctgtaaatgtctctcttaacagtgttttatctgtgtcccagaaattctgatatgttgtattttgttctcattaatttcaaagaatttcttgatttctgccttaattttactgtttatccaaaagtcattcttgagtaggttgtttaacttgtatgtaattgtatgattttattactattgttttatatttttattgtgctgtgttctgagagtgtgtttggtatgatttgatttttttttaatttactgagattgtttcaggtacaattggattgtcagttttagagtatgtatcacatgcatatgagaagaatgtatattcttttgttttagggtagaaagttctgtagatgtttgtcaggcctgtttgatcaactgtcaagttcaggttctgaatatctttgttagttttgtgcctcaatgacctgtctaatactgccagtggggtcttgaagtcttccacttttattgcgtggttatctaagtctctttgtaggtttctaagaactcgttttatgaatctgagtgcctcttgttaggtgcatatatatttagaatagttaggtcttcttattgaatacatcctttactatcatgtaatgcccttctttgtcttttttgatcactgtcgtttaaagtctgttttgtctgaaattgaactatcaatccttgcttttttcagttttctgtttgtttggtagatttttctccatctctttacttagaacctatgggtgtcattgcatgtgagatgggtatcttgtagacagcatacagctgggtctttcttctttatctaacttacccctctttgccttttgagtgagacatttagcctatttagtttcaaggttaatattgatatgtgcaggtttgattgtatcagtgtgtcattagctagttattatgtatagtttgagctcttaacatttagatctttgatcctttttgaattgaattttccatattgtatgaagtttgggtccaacttcattctttttcatgttgatatatagtcatctcagcactgtttattgaaagatcttttttccattaaatttttcttgacacctttgtaaaaaaaatcaactgatcataagcataagggtttattttctgaccctcaaatcaattttattgacctttatgtctaatattccagcactacacattcttgattactgtagtttcttagtaagtttagaaatcagataatgcaagtcctccaaatttttttctgttttatcagattgttttggcttgtctggttcccttggattaactatacatttgagaatcagcttgtcaatttcttttaaaaagtaagttggaattttgataaggatggcattaaatttatagatcaatttgatgattagtgtcatttttacattaagatttccaatacatgaatacaaaatgccattccatttatttgatctcctataatttccttcaatgacattctgcagtttttgtgtacaagtcattcactacaagtgaaagaatgcaagactacaagtctttcacttaaacatatacctaaatattttaatctttttgatgttgttttacatggaactgtttctatagttttgttttggaattattccttattttataaacatataattaattttatgttcatgttatatcctataaatttactgaatccattcattagtctttaatagaatttttatggattacttatttttgaagatcatgtcatcttgaaatagatatagttatattcatttcttttctactttgataccttttttttcccttacctaattgccctggtcaaaacctctagtatattgttgacaagaaatggtgagagtgggcatctttgtcttgttcaccatctcagggatgaaatgctcagtattttccagtaagtatgattttagctgtgtgttttcctagatgtcctttacaagattgaggaaatcccatttgattcctagattttgaggatttctatagtgaaatgatgttgaatttctttgagaaatgttgtttctgtgtctattgttgtgatgatgtgggtttttttattgtattgatttgttgtattatattggtttttcatctgttgaactaaatttgcaatctagagtaactccactaggtcataatatacagtcattttttaatactgctggatttggtgtctttttattatccttaggactttttttatttctattcatagatatactggcttgtagatttttcttgtaatgtctttgtatttggtgtcaggataattctgccttcatagaatgagttgtaaagtgttccttctgttttttgctagagtttgtgaatgattgaaacatttggtagaatttatctatgaagacttttcttggtgaagttattttaaaaaataatttactaatttgatctctttgttacaagtctatgaagaatttctatttcttcttcagtctgtttggtagcttgtttattcctaaaaatttgtctactcatctagttcatctaatttgttggcatacagttgtacacttttaatgttttttaattctgtaacatcagtagtagtgttccctgtttaagtcttaattttcataatttgcatcttctcttttttttccccttggtctgtttagctaaagtttcatcagttatatggattgcttaaaataattggttttgttgattcttcctattgtttctctgttctctattttacttatatccactgtaatatatattatttcttctgcttgctttgatttaatatttttacatttataatttcttaagatagaagtttatgatattaatttaagatatatatcaaacaggcattcacaaatataaatttccttgtaagcactgcttttacatcccatgaattttggtatgctatattttcacttgtatttatctcataaaattaactaatttctcttatgatttcttctttgatttattgattattttagagaatatcatttaatttctaactatttgtgactttcccagatttcttcttgttattgatttataattttatgcctttgtggttggttagcctttgtttggaaagatattttgggtgggtataaaattctagattgacttttttttcaatattttagagttgctgttccactgcttttttcactagtgtttttccaatgagaagttagttgtcgttgcttatctttgtttctctttacgtggcatgtcattttttgttttccaagggaaggagcaattgttggctgatttaagatttgtttctttgtctatgattttaagaaatttgattatcacatgacttgctgtagttttctttatgtttctcgtgcttgggatttattaaacttcttgtatttgttagttaacaattattatcaaatttggaaaacatctttttcattatttttcaaatatttttaaccttctctctctcaagaggcactaattaaatatatattagggtgactgactgtgttccacagcttaataatgctcttttaattttttctcttcatgtgttccatttggatactttctattgctatgtctttaggctcagtaatctttttggcaatatctaatctgccattgagcatatccaatgatccaatatattttacttctcacatactgtagttatcattaataaacttttaagaactgtcataatgtagcttttcttgctaattttaatatctttgtgagttctaggtgagtttagattcattaaattttctcctcataatggtttgtattttttttcatacttatatgcttgatagtctttgattagatgatagatactataaattttactttgttgagtgctagaaatgtttgcatttttataaataatcttgagttatgttctatcgctcagttaatttacttgaagcaattagatctcctggtttttttttttttttttttgatagagtctcagtctgttgcctaggctggagtacagtggtgctgtgtcagctcactgcaacctctgcctcctgggttcaagcaatgctcctgcctcagcctcccaagtagttgggactacaggtcccaactacaactcccaagcaccatcacacctggatattttttgtatttttagtagagacggtgttttgccatgttggcctggctggtcttgacctcctcacctcaactgatcttcctgccttggcctcccaaaatgttgggattacaggcgtgagccaccacacctggccagggtcttgaattaaatatttattttcagaactagagcagcagtttttccacagctaagtatttcttaccaccaaagcaggaccctctgtgtagtctacctaaaagcttcataaattatttggtttttccgttttggaaagtgggaatagactgtccctgaccctgtgtatgtgctaagcattcttccctgttatcttcacagatgattttcccctggcctctggtaattccttatatgtatgtggtaatgagtactctgctgaatactagacgagaacattctaagaatgtctgaacctttgcacacttctctcctctctggtactttgtcctgtgaagtctagctgtgttgcctctccccagattcttagttctgtatccccaagtgagggagtttgaaaggctccacctgaattttccctccctgtatcacaacctgcaaactctctcaaggcagtatttgggataatcatgtctgtctttttccctctgttgctcaggatcactgtcctgggctgataatgtccagtgactttaaatctgttgtttcatttattttcctatttgttgttgtttttgttattttaagtgggagtgtattctcttggctggaatcatagttctacaaacatatattgatttgtattttggcatatgttgccaattttgttattgagatttttgttgttataaaatagagttttgattttattattagcttctaagatatcttattaaaccaaatagttaaatatctattaataattcagtgcaactaaaaaactttgtcacagtaatgtaagtagaatagatataggaattttagatgacattaacaatgtatttgaaagaagatctgggaatattaaatctattgtgcctaagaaagcatgcgattataatagtgtgaaaaaagaggaatgagataatatgtagaatattttcaatagaacatgtgctataactaaaatacatagagtacaaaaaatttcgagatcagtttgttggagagataaactagagtaatatgtttatgctttttataaaaacaaccaaggtatatattcataggcaagtaagatgggtataagaaataggaattaattaaatatgtatgaatgtaaaaaatttgaaaagatatggaaatattaccaaagagcatcccacaaatcaaaagtataaagtttaattcatttgtatgaggattttaattttcaattgttgtcacttattctttaaaatcatttgttaactaacttcacagttcaagatttagagcagaaagttgtcttatggagcaacatatatatttgtgtttaacaagagtgaactcttccatcctgccacacatgagaattttgattaaacctttgaacgatgggtgtctaattgttttgatctatagctgttatcagtttttaaataggttataatataatatttagtatagtatcaagacagtgagagatttatcttttatgtcataatgatatatgcctattagcaatatgaaaaatctaccaattctaaaatatctttaaaaacattatagaaaaggattattaaaatacacaacttcaatataattttggctgtgtaatgggaataataataatcaaataacattgtatcttaatttatgaaatgtttttaaagcatttggttttatcaaaatagactcaggtgtaataatatggaattctgtatttttaacttatcaaagcagaaatacttctagcatgatttaaattttacaaaccatcattgtaaaatccagaatgaacatactattaacctcaagtaattaattggatttgtttctattgtgccatgtttcctttgcaagtcatgtcaagagactgataagaaaactcttgaattcatatgaattccaaaagttgttaattaatgcccaatcatagtcattttttagttgtaaatctagaagcccttgctcagaaattgatatagccctgaatataagggctggaaggtttagaacgaaaggcctgaatctgatataccagggtgaaccttcagagtctaacttcattcaggctatataataacatcagtgctctaggttctcattttcattccagattcatagtggacccacagttctgaatttttattcatgagtttggagccacaggatcctgcctacatctttgtaattgcttttatttagagttgtacttaccttttgttaccttaatcttttaatgaggttctgttcaaattatgaattggatcagcatataacccctgtcttgaacattctgtgtctacactctcttgagacatgttatttttcctgtcatcttatgcctgcagtttgagataggtggaattactctggtagtatatttttttaatagcttataagtcagttatttaaaaaaaaaaaaacacaaaacccggggactttgttatgaaggaagccttttggtaatgatttccatcaaaataagatatccaaaagagtcactgcaaaaaagtaaaacaacaacaacaactacgggataaggatataaaattagaaaagtaacaacttagggaaagaaagttttctatttctattagctgtgttaaggactctaaactctttattttgcttattctaattttgatattcactgaagtcagtaagggtacactctcaaccttccaaggattggaagagcatcctacattgacctaatttccaaccctacacactgctggtgtgattctattagtttaccacttagagtttgaggaaagttgtcattaaaatattaaaacttttgccaaagattcctattatatttatttagttgcatttggataaacctgtttgctggtaacagaaacaaattatataaattgtaacacagaagtcaatccccttttgaaagaaaaactgaatgatatccttttgtgagtcttaccactatgatgtaggaatttcatgccacttagatggcggtttcagggggctttcaggcggtttctctattgtacatacggtgagatggaagttagcatgctgggtatttattaaggaatgcctttggaatctacatctgtggaagggagagaaaggtaacaggactggtaagagcaagagattgaattcttggtgatcatgatcccagaatagagtaaccttggctgatctcataccatgcttaggtgctagcagagccctttgtatttcccttacttggagcacaatgactggactttatattcctgcatcaactagtcatcggatgtgccctaccccaactggtgtagctttggatggagttcctgtagttctacaagacaatacctgaaggactggcaactgaaggatgtctcttgtctgcactcctaatagttgaagcaatcaagtgtttatggaagggggagctgggtggtacatcacagttccatcaaaatgtatttcccaaacttttagctacaattctaaggaggtctccagaattacttaatcattaacgtgggatacccctcttttttctacattagccattgcagtaggtaccacatcatctactcccccaaatttaaaaataaacatatactaatgtacttttctgaaacagacctgccaagactatcattttcttttcaatttcattccttttcaacttcactaaagaccttctaaagaaccatggcttttttttgcttcagtgaaccatttgaacatatcataggataataattggaagcatacctttgaatgcacaggccattatttccttcatagttatgttcatttctttctttaaattctgaagaaagagagcaggatcttagaaaagttctgctaaataagatataggaaaacaaaggaaataaatgtgagaggaacaaggccttttagtacctgtcagactgaaagaggtccataactaggaatgtctgacatctcctatgaccacaagggtgtcagaacctgcttttgaaaataagtaaaatcacacttaaaattaacaatttgcaaacctaaatttatatctttaatggaagatctcaaaatatgactacagaggattttcattaatcacctttggctcggtgcttttgtctactgtaaaacaatttgtcatttatttcatcagaattgacacaaattctggaaggatggaaacatttttaagtctgtgttagtttctctttggagaaacatgtcagtgcagtggacttccataggttaatttattccctttatgctttagagtgggtccagagcacagccttttctatagcgaggtggaggtgacagaggaacaggaattgaatgccttgccctcaacgagtttgtaatgtttcatactgctgatttatttctgttaaaaagatactaaaattcatgattatgattatgacccagatgtaatatgctggggctcttgattttcaactaaattaagcaacaatactattaatatcattgtttattattattactttgctgacagggacagaggctaaaagtgaattctgacacttgtaaatatccatattttaggatactgtttaattatgatctatttctaatccaaatgctccagtggaatgtttgaataagaatcagcagctctttatggatataaagatctagttatgagcattgattgcaagcaagggttttgaggcctggtaagaactattatatcatatcataaacatatatgagagagaagagagagaaaaagaaatgtgtgcatctggctcaatttgaagtccttatcaaatatagagagagggcagggaaagaagttggccatatagtaagttcaattttttaagatgccccagaaatcatttttctatgtattgattcaagcaattttctaaagatttcttcatggacagtataatagttggagttttcattagacagttctctgggaatagagattaaagtccagccctcttgaagaataaagtagtaaatctgagtcacaggaggctaacagtgcaatacagaggccaggagacagcgcccactgtggagcagtgtgtgaagaggcactacagcttatgtttggacgtgacactagtagaatgtgatctttcttcccctcctccaattattcaggtaaaactggaagagcaataattgtaattatcctgttgacctctcagttttgcttcgaagactactcaacctaacttaattatgtttacttccaagcacaaaatctttcatgccccaacttgaggtcttaataaggacaaaaggaatattttttcaggtgcactaatgtcattgcagttgtccatggagttagtgattatttgagttctacatgcccagcatatatggttgcaactgtatttctgggcttctgtggtatcgataagggtttggtgagatgctaaaaggtccttgggaaatagtaacatcaacaacagcaaatgcattttagctaagtttttcttttgtctttacctagactcagtaattaccttgttctgtacagtactatcaagaggctacctttttatttgttccaaaatagatattaacagatggaactcacactgtgtaaaataattctattgacaatagttcgatgtatcaaagatgaaggtaaagaaaaaaagtgcactgatgaactctgagaggtgatattgttaattgtttgatagtcttatatactagcaactttgtatgactgacacctctggtactttctcccgaatattcctgtattttgttttgagaaggtcttttgtccagaaaacatgtcccttgggtttgtagctgaactcatcaaactcaataaaggcatgcttctttctattgaaattccttttccccaatgttatgctatgaacttactcctctttctctgggtttattttgttcttactttatcctgattttaatgacatctctgattcttcccaattctgtttagaaacacattaccttaatctcaagaaaaatgtgtttcttttttttctcaataagacattgtataaacagtggaatttttcacaagtaaagacatcaagaaaaactctttacatagaaactaattgaaatattttatcctaagggaattttagttgacattagatcagttaatattactgacttgctatcatgatgttcattgtaaaatctaaagtacaaggcccttgacaataaattttaagtcataggttttataattatgggtgtatttagtaatgtccagagtagtttacatccaagacaaaaaagcatattcttccaaatagtgtgaaacataccctacaaaagaagaaaacctcagagtcagataacatcaagagaagagtccctgtccaatcaggcacaaagacattgggccttctgaagtcattctatgtgttagcattcttactgtaagtggaaaagaaaacatggacttatatcatggaaaagaaaattatgaacttatatttaaaagagtaggttactaattcaagacttccccagtgaaggcatcacagaaaggagacagggtatatatacaatgtggaaacagcagtaaagacatactttctttactgtataagcagtcatgtaatttgtcattgatagaaataagttgtctgtggcgtatttgcattgcaaaaattcatatcattaaattatacaccatcccaaaataatagatactgcctgtaaaacagaaagtattcctctctaatattcattaccttatataaaaaaatagtataaaacattttcagcaggagatatgttgggaatctgagttctttcacacaaagagaattccaaggaggttaaagaaagaggtcaatgtgttaccttccacatctgaaattttatcaccgatttatgacatatttataataatctatgccatataaaaataaaatatcaaccatttgagaatatcatggcaattttgttaattaagtattagatataattaacttctcattcacagtttgtgaatacaattattagttgttaagacacatccttatggaaatattttaattatcttttatgtgtctttaagtgtgggattacttggacatattactccccaatctttcctcacctccaaaatggatatcctatacttcctcctggtgttataagaaacagtcacacatttgaaaacactttaaaacagtaacgcattatgtacatgttagaattatgtatgcatttgttattgaccttgtctgtgattagcttcttaaaattaccaaattaatcttatttacttctaagtacttaaaaacactttgttgttattatagattcacaaagtgagacatgaaaataatactttccaatctataaaatacaataaaaacctttgtagttgaaactatttctctataaaagtaacacctctttataaatcagtcataatttctgtttttcttctttttataagagctgatatcctctttccatagttcttctcatttcagattaaaaatcaaaacagggcaggaaggaagcatgtggagtctggcgccagattgccttggttcatatcacttactagttgtctgacttcaggaaaatatcttactctgtcagtgcttcagtttcctcatctataaagtacttacaataatgttatgtcctcctggagctgtgagaataaaatgagataacatagacgaagaacatggcagtgtgcctaggacataccacctacccagggaatgtcagctttcattacgctgatccttctctggaagttttgaaccaattcccatctccaatattgtgcctactgtctaacatataaagcgttacttaaagatccggaccatcaaaagacttattatctgtatttaaccttccagacagttttgattttgtggcttctaggctgtcatcctccagagccacaattcaattaggtagaaaatcttaaatctaacattaacagggtgtatatattgagggactttttaatgcctcacaatatacatactcaggtatttctcccagtgctccagcaacactgatctttattctgaacctagaatggatcaagccaagttccttccagccttggagccttggctctgcctctttcctttgcctgcattgctgttccttcacatcttttcatggctcactcatttcagcattcagatccctgttaaccagccccctacctccaacacattaatggatcttcatagttatctatttaaatttcttctgtttttatgtcccatcatgagctattaatataagtttaataaaagcagtggccatatctgacttagtccctaactacagcattctcagtatactacagtgtctgatatctactaactattcaatacatatttattgaatggagaaatgaaaacatgaattgtttatatgtttactcttcaccctgtagtgatagactggagttttaaatatcagaatgattttgtgtgtgtaaggatgtgtgtgtgcacaaatagatgggaaaaaaaataatgtgtctctatatgtgggtgagtttacatgtatgtttttcttagctcagccactgtctgcctagtcagtgacattccagtagtagcaagcacacttagtatccagatattgattcctaaacaccatgcttcattaaaaggaaatttggctcccttgaaaaaagattgcttccagggctggagcagggaaaatgcaagatgagcctgaagcctcttgtagtgacagaaagtgaataagttctcaataaaataaaaaataaaaaggatgaaagcatgtcaaaagaacactcgtgccaacctgaaaaagctcccaatggacaaagatgagacagtttgggcaataaaagaaacaataatagtatcaggttataactcaaaaataaaataaatatatataagtccataatgacataaataaatgatatggataaataaataaatggacatagaaggggacaatttttccttaagaaatcaaagtaataattgtagaaggaatgagggaaatagaaaatcacccttagaatacaacagtaagaaatgctgcaggcaagatcccctgatgtataccgaaatcagtgggcaaaactgtaaggagaaaaaggactatttatatcttcccaaaacatttattaattattttggtggttctgacatatgtctaaaaactttttaataaatttctcactagtaagttagttaatttctctcatcttgagtatgagctggacttactgacttgcttctattagatagaagaccatgaacaaagctggcagacatgaccttaaccaagtgatcaaggttaatatcaccagtattaagtcatgttggtatcatgcagcaatacactgaaatggccacatcacttctgtgggactgtctccaaatccataacctcagtttaatcatgagaaaagtcaggcagacctaagttgagggacattctatagaatatctgaccagtaatcctcaaaagtaccaaggtcatcaaagacgaggaacaactccgacattgtcacaaaattggagaatattaaggagacatgatgactaatgcaatgtggtatcctgagatggatcctgaaagagaataaaaatattagacaaaaataaggtgaaatcctaatcaagtctgtggttcagttagcagtatttaccaaaactaatttcctaatttttttaaagaaacatgtttatgtaagatactagcattagcagaagctaaaaggcataaggaaactctctgtatggtttttgcaacagttctgtaagtttgaaatcattttaaaataaaaagttaaagaaaacagtgaaagtattttaaacccagtttctagtacagattaagcattcaacaaagctttttaaaattaattagtgtgtttgatagtatttttttacataactatagaattatcttcattgatttatatgtaagtctagaacttccctctagtcaaaccatctccattaagtgtgcatgcagttttcaaggttctattcttttgttgattctctcttccaaaaatgaccttcgatttttgttccctagctacatatttttcatccttcaaaatccagctcaaatgttacctatctgtgagcctttttgagtgtctataaatctttctaaatatccttactttagtattgatgatattatgctcgatgtcttctatgccttccttgcaacctgaaaataggaacatttcagaaggaaaagcagtatctctacaattcgtaatacccacttagtgcccaaagacagtagacattcaataaagtgttcatagattaataaatgacagaatgaattactaattattctgttttaagtatttggcttggtcatcatattcagttatgtgatattagaataaaagatttataacctttttttatttcttaactctcccaaacccataacaaaggtttatttcatatatgcaagcgactgccctcacacccaatttaaacagtttgtttaatgctgcacagttatgattcccagctgtacctagagtagagtgaagaagtggagtgaaggatgatgcaggagaacattgtttatttcattcattctggctgttttgtgagtaatgttacactgtctttcaagatcacttacatagattctctgccagaggagagggatgctgacttttaaaaatatttgccataatgaaattatcttccttatttaggaaaaacaattttagaaaacttttatgttacattccacagtaacaataaaatatgttcacattttggacatatttttttatttatggcaaaaataagatgtagactgacttcatgctttgataaatattcattcaaatatttcctgtcaaaagaagcacaacaaaatgcttgattattttaaaattaatgccttacaattgtctaggtgatttgttagtatttattactcttcataaatttgaaatatcgaaaatgtttattttctttaaaatattttactgattttcagcttaaaaaccgaaaccattaaatataagggaaatactcttgtgggactttttacttgaaatatttactataataaaattcatattaatttgtatcataaagtctatagcatcaatattgtattcataattttatggtttatatcagtttatattttagctattatttttatttagtgtcctgttagtcctattctattcatatgattggtgattggtaaaaatgcatttctatacacatgtatatattttatctttagtagctcatacagctatctacatatacctatatattacatttggagaatatttctagtatcagtaatacattcatattttcattaattttataaaaaatcatactttttcaattttataaaactaaagctgaaacaactaaatactaaatgcatactatgggagtagattattagaaattagtcctcttgtaaactatgaacctagctgatcactacctctccaatagtttggaaactaattttataaaataaatgtagatatttcttgcattaacaataaaaccgtcagtcagatgcagtggtgtgcacctttatttctagctactcaggaggctgaggcaggaggatcacttgagcccaggagttcaagactgtggaggaccatgattaatcatgtgaatagccactgcactctagcctggacaacatagtaagacctatctctaaataaataaataatactgtcaataatcattacattttaattatatctgccacagaatatgtgccagtttacattcatctaaatcacttgacttaaacaacattttaacaaattattcatatgcgcttatatctggaaatgcactgagaggtaatcaaagtatcaccattgattgaatacctatatattagccactttgtagatattatatcgcatttgcactgcaacaaccccgcctatggacataattatctactttgacacacagagagagacttagaggaaatgaccagcctaggctaagtagcagaagatttcaaaaacacaataattttggctccaaaaccaacacattttttcattgtcagttttgatgctaggaatggtaaacatttagtattgtatccttacatagtataaaatcacctgaagtcttcagatcgaaccttcttgggttgtgcatttagtttttggattacaatgtgattgcagtaaacccctgaacttccaaaattacaggagtcaaaagtcagggcttttaaaataaaatagtatttgctttatgtcttctaggacacaaacaccatggtccatttaacaaattgcatcttaattctttcacacaagattctgagatagtcagtgttatcccttttttacatatgagaaatcagctctgagttaagtaattctgcccaaaccacaaaggtatcaaagttggggttcaaataagtttttgctgactacaagtcttgtgttccttaaaaataaaaaatgtagacagtcaagagggtttctagaatttgacaaaagaagaggcagtagaaggaacagaaaacaaaaaaagaattatctagtagaaaaatcagatcagtcttgaggaaattagtaacgggcaagttgggctctacatgcattgctagaggctaagggcacagcattgaccaggtgttggtgttaaagattacttccctttaggccgggcgcagtggctcacgcctgtaatcccagcactttgggaggccaaggtgggtggatcatgaggtcaggagatcgagaccaacctggctagcacagtgaaaccctgtctctactaaaaatacaaaaaaaaattagctgggcaaggcggtgggcacctttagtcccagctacttgggaggctgaggcaggagaatggcgtgaacccaggaggcagaggttgcagtgagcggagatcacgccactgtattccagcctgggcaacagagccagactctgtctcaaaaaaaaaaaaaaaagattacctccctttattgagatggtctctcactataatcactcattacaaaatactaaagaagatagctattaaaaataatgtttcactaaaatatatttctagtataatatttgttaccttcaggacatagaaaatagatatagaaaatgtggaatttgcataacaatcatgattttacttccaaacacttatatagttggtttcagcaggttgtaatgagaatacgtaatgagatctggtttaaagtaagaaaataaaatatttatagacatctcagtgtctgatactatgtagacaaaatatttgattgatatttggaagtatttttttcacttttcatctaaatgttccatcattgcataccatgagcctatgaggtttttagtatcatgacactttgagattctaattttgaatggaaactggaaaactcacttgtaaaatatcaaccgtcagcttcccctgaggaataaataattttatgataattttgatgaatcagtaattgtttatgaagttaataaaccattttttttctgaagtggtgtaggataataactgttagagtagatttgggtaatttaattcctcaatttttaagaaggcagctggatcatcaagaagcagagaaatagccgagctctaggagccagagtgagaaaggatgattctactatgtagttcatagctctttcttatatcttaaatcaacactttaaattactttatgccacctcctagaatgagaggaaacttgaattaaagaacatactttcatttagttaaagcttaaatgaagatttgatggaaaatacactatgctatttatgtgaataatcttatcatatctgctaaacaccccaaggcctagaggtaattgaattttagaaaaatgctaacgtgtctgctgataaaaactgctttaagtgtagtcttcactatctaagtgccaatatgctaaagaaataaacctctgggatgagtatttaagagtcataatgcagctttatgtcattaaaaaatgatcacaatgtcatagggttgatgactgtgcagaataacaaaattctctagacggcaatccatcataaacttggaaaataaccgagtaacttgtcaaaattcctttgcccaaaaagtctagtcttttaagttgctacggtaattactacatttgttggaggtatttaggagatgacaaattccttgtgcataatgaacctttataaagagtattctaagcattctaatttttttaagttgcctttgatttgcataactgatgtctgagttcagtgtagaaataaacttgactggtaaattcaaaggacatgagaagactgaggaaaaaattaaaagttcaagacaaaaggaaagaattgccttttataatatttatatcttctacttttttcgctactgttttcaggatgttaaatacttagtctgaattgctattcagagaacagcaaagggagtgagaatcgtcatgtagaacaatcccactgagtttaaacctcctggttttaatttatcattgggaatgaaaccatatttaattatttatcattgcgacatgtcatatgagcaaaggaataaattgtgctaccatttcttagttgcatccatagtcagttgaactagattcattcactgtctgtaactggggagttgtggtgagaacagattagatacctctaacatgccatgagtctattttattttatttttatttttaattaatttattttttaagacaggtcttgctgtgtcacccaggctggagtgcagtggtacgatcacagcttactgtagtctggacctcctgggctaaagcaatcctcctgtgtcagtctctcgaagtgctgggattacaagcgtgagccaccatgcccagctaattcttacttgtattttattttattttactttactttactttactttactttactttactttattttattttattttattttattttattttattttatttttgtagagaggagttttgctatgttgtccagactggtctcgaactcctgggctcaaggaatcctattgccttggcctctcaaagtactgggattacaggcatgagccactgacccagcccttaagtcttttttagacacaagtgagcagacaattatgagcctggaaatattccttaatgaggaggagagccaatgggacagtgacaaatagggctaagtccattaccttgagtattacagatcaacactgcagccaggattcaattttcaaacaagcttcagatctgaggtactaatatttaggggagctccaggagtattggtgaggactcaaaagaactccctgagagctggtgatgagaaaacaggttcagaatcagaagacccactgcatgggtgatcccatcactagagaattgcagaacataataaaaacctagccactgggaaactgaatggccattcagtaacagaataaaagtctaaatgtgtaatacagggtaataaggaaaactgagcatcaggtagcgaacatatttacaaagcccacatgaccttcgtcaaataaattaacctctgtattcattgcatgggacactaataatagtacttacccaagaaggttttcctgaagattcattgagttcatacaggtgaaacttagaacagtccttgtaagttttccggaatttttgttgttgttgttgctattgttattatgttgttcttgttacaggtgcctgaagttaaagttgagtcttaaactctggttgtttaagcaataaaggcaagaacaaaattctgagaccagcctcactcaggagcatctctgctagaactcttgctcctgcctgccatgaccaaaaatcgtcaggaaatgtggggtcgaatttagcctgaaggtttttaccacatctgaccctgatttctcactgaaaccatcagcattttcattgctaatattttgctgcatcttctggatgcaacatttagtagctgtatgaccgtgagggagttattaaacttatctgagccacagaaatgtattgccttctcctgtgactttgaatagtgctttcatattcccaaatgtctataatcagtagaaagttcaccatttggtaaaaataataagagtcactaagtaaattagaagaggattaaatgaagtaacaaaaattttgaaaaggtacagcagcaaagttgttgtgtaatggtaggactggttatgaaaaacaaaggcagttattttaggagcagaaactagcataaaatgggaatctcttttgcatctccattactttaagaatcctgcttcctcctcctagaattccttgcttctgtatagtcattgggaaaatatctgcttatagttaaatacttaggtgaagctccacctcctccagcaagcatttcttacccccctgatagagcttgctgctttctcctctgaatcctccaaaaacattgctcatgtctaaactgaagaccttgccacaaagtgtctaccattgactgtcaacaaggctcctcctccacctcataatgtcctctctttggtcagggtttggtggtggtggttgtcttaacagctttatttgaggtataatttacatatacacaaaatttacctgttgggattgtattttatgtgactttacatcctcagcctgcaaaatcatcctgatccaacacagaatatgccagaacaaaccatttttgatgaattattttataacaaagaaaaatacatgtgtgaatttgtaaaactgtattcctagtaagaaattctaaatccagcttaattgaacatatgtgtttaattcttttaaaaaatacatattatctaaagaaagatcatattttatataacagtagttatttttagaagtaaaaaatagccaaattaattgcatcttataaaacatgtttagactgaaggctacattagaaaattctaactgtatgatgttcaaaaacttctttttttagttatcataaaataaatacatttgaaactatgtctcttaattgtgtttatctgaacagttacagaattctggagatagtttctttggaaacctcatggtatatactgatgggacacccagtctatgaggaagagcagaaaaatcatgtatcaaagcagaacaatagtacttttttaattaagtaaaaagttatagcttgattgaagcatggagatcatttaatataactaatggaaaagtaaaagagtgacaaagttagtaaagtgttcaaggtcacatggtttgttggcagcgacaatgttaaaagcagagacgaatagaatcacagtgttaatattcactgaagattatccagtttagctacccatctggttattgaatcctctctcccacattcctttcaagttgttgcttctatgtttgaatactgccggtaacagggagtcatctagcctctgagataaagtatttaatctttggataagtattatactattaaaagttcaccttttgttgagaagcaagcttttctttgtaatttctacctactagtcttgatgttagctttcgaagtcatcaaaaacaagtcaaatatcttttaaatcggagagactttgctagttattaaggacagatgattgttccttttaacaaaataaacttttattttgtgatgaatgtttattttttatcaagatatattatgttctcattattaaacaacaaaaaaaaccaccaattacccatatgtaacctttcttaattataactgtagttacctcctttttagtgtaagttttttcattgttacagatgcattcttacatttaaaattttaaccatgactaccacttatcatagtatgattattttcctgtgacagtaaaatgcaatatgcattattttaatacctgaacatttttgttaaataaatattcagaacttcattgaattacttgaccattattagcttttgagtctctctattttttcccaacaattaatagcagaattgtgtttacttttatgcacatattacctgccttttaccacacaactctagcgtaagttcctggaaggaggtatttctagggtgaacaacttgaacctttcaaaagagtgatacgcatatttccaatttcccttcagtttaagccaccaccagcaatttatgaagaaattccttaactgcatcatttctagtattgggttttcttttgtctgtaatctgatcacatggcacacaataacttttatcttattggtagatttctaagcttttagaggtcagcaaagttgaatgctttgtcaaacattttctacttatatttccttttctccaaagggactgttcattatactcttggaatcttagtggtttttcttttctacttaataaactcttctttgtcatatgtattttgaataatttccctagttattttgtattttaattttgtgtgttaggttgtagtactaagccctgttgtggggtagggggaggggggagggatagcattaggagatatacctaatgttaaatgacgagttaataggtgcagcacaccaacatggcacatgtatatatatgtaacaaacctgcacattgtgcacgtgtaccctaaaacttaaagtataatttaaaaaaagaatttttaaatgctatgtatgcacagggtgccttccacagtcatttctccagtttttactcttctccatcaaaaggatagactaatatttatttatattttcctatcattttacgtgctttaatatttaactttaaaatctatttagaaaacattctcatggtgctacaaaatattattttcaaaacttctaaccagacgtctcaacgtcacttattatttttccattcctgactctaatttgtcacgcttccctgttaatacactactctgcagtttgtgtctaattacttctctcgtctctggctttttccctcacacagacacacaacactaccaccaccactgcaacaacagcaaaaacaacggcaatgcctaagccacatagtttcttttcttacatttgcaataatctcctaattggtatcagtgattttattaaaatagaaggatcacatatttatcaaaaattctatatatgcatccaaatttaagcattttgtctttttttttgtttgcacatccacgtacacacacacacacacacacacacacacacacacacaaatttagaagccagaggtcagttacgggccacaggatctgattgtggtgggaaacactgaacatattttgctgttaaataagtcatttgtgaaacaggtgattttcctttctttgtctaatcttgttaatgcttatttgtaaaatgtattgccaccctcacccacatttcttcttaatattgtttttcttatgacaagttatgccttcattgtaaacaagacaagtagtgagtctttaacacagtgaaagaagtacaagtgtttctgatgtagtaataacatttatgcacgcgttcttgtttttacatcgtatatacatctaaatatattcctaaaaaccttctaattctacaaattatgccaaataataggggctaggggaaataaggattagagcaagattactcaaaatatgttaaatcagagcactagtaaaaacattaataaactaaaaaatgtgacatttaaattcccatgaatattgtgctagcatcagagtctgtcattatggcatcttaatcttaggggttaatatgttaatgtgtccactttccttgtaaacccttgatgaaactcactggtttattggcagatggtctcttagtttccatgcttgtataattgctaattaatcagcagtgagagtgatctttaaaatcagaaatcagattatgttattacctcacacaaagcccttctgtaacttcctattatgcctagaatgaatttcaaagtccttgtcctgaatcctttggctacagtctagctctgcagactcatctcttccgctttttcctttagtcatcgcactcctgccaactggccctctgtcattccctagattgcatcctgttcctcctgcctcaaaattttctggttcctttaacatcatgattttttctgcaccttttcacatagctagcattttatcatttctcatgtttcagggagactatccctgttcatctgacctcatgcaggtcttcatctcttctcctcctgcaaatttctccatctcatcttaaaacttgtttccctcataggatttatagaaatttataattattatgtttgctaattttcattggttccttccactggatcataaactctgtgagtgcaggacattggtactcattcaccatggtattgccaatgtttgaaacacaaatcttgacatacagatatgttcattaaacattttactctattaccctttcctgagcaccatgtatatttcagtgagcaaaacagacaaaaaaatctcttgactatttaaataagagaaaactttttcgtttatccttttttttttttttttttttattgagacagagtcttgctgtgttgcccaggctggagtgtagtggcacgatatcggctcactgcaacctccacctcccaggttcaagcgattctcctgcctcagcctcccaagtagctgggactacaggtgcatgccactatgcccggctaattttttttcatatttttagtagagacagggtttcactattttggccaggctggtcttgaactcctgaccttgtgatctgcccacctaggcctcccaaagtgctgggattacaggtgtgagccaccatgacaggcctgtttcatcttcatactttccttatagtgtacttctatgtctaaacatggtctataagtaaaaaactgaggtcatatgcactagactaatgttattccttcctgcatttaaataattttaataagatataaaattacagcttctgttttttcttccctatttttaaagcaatacctctttatattattgcctccaaatttactgttatgaggtatgatgttaacctgattctttatatattgaactcaccaaatatgtcaccatacaaactcctactaaagcaaagctaagttcaatagaacttgcaacggtaaagaagagtgtcacctggactgaattttaccatgtcaccaaaggggggaggataatataccgagttttctggcctgtgctcagttggtttcaggttgatctttcaaggcgggaaaatgattaggatgaggcaatttttgtgacctaatagtttatgattggtggatttagcaaaaagagacttctgaagagagtcctgataagtaaccttatttaataagggagctgcttgcccaggtaggcaaatattatctcagctaaacagacatgcagaaatttattgatgtaaatagtgattatttatatgcaaatagtggttattggtttacaatcttatcttttctgagcaaaacttttagggaataaacaactaattaatgttgacatagctattaataagttgtgtggttgcagtctcatgggggatgtgctattttccctcctcctttagaatattttctgtccctaagggagttattcttacatgtccagtgtgacactgtgaattctttctgatgtcttatgcatctttttataactattaaagttgttggtcattactaataaaaatagtccttatactctattatttcatttttactttctgcaactactattttatagatattggcccttgtgtttctattctctatttctattaacttttatattttacaaactgagagagtttcatgaccagttcactggttaattctagtgttgttctaccagcatctgtgattattcttaatgttttcttattcctaagtttttctcctatccctttttataattttgtagagattaatatgcatgttttattctcctgttatctggtacactaattctacttcttctgttataagatactcaaattgctttctaagatgtcttaattttttccctctgtgtttatattcccctgtaaacatcagcaaattactaaagtcttgtgccattctgaagattttaggaagtaaagatgagaaacatgtttctgagccatgagctagccatgtgttgatttatacattacagttatatttcctcatacagctgccaaaagcttagtagtaaagatgtgcagaaaagaaaaacaggcaaaaaaaaaaaagaaataaagtattttgcacaggtgatttgatagcttaacagctattgactggaattgctaaaacaattttaggcaagtggttaagacaatttgaccctatttatttaatctaaaatggcagagtaaaactctaagagtataatcattaattccttgattcacctacaaattttgaatgctgatgcagaactgtttacttcacaatctcttatatacacaccagtaagaaatgttctaaatctaagagatccacagggtttataaagatgcataaaaaaggctacataactgtgcattgagaggaagaaaagaaacatcatcaggggctatgatgcttcagaaagattttaaaacccggcaggagttgctaagtgcccaagggaaggaaaagcactcagactgtaaagagcagtataagaggcttagagttacagtagccaagtagtttggtattttgggcagtgtaaaataaacttgcctgggacagtcttggaagccagatcatggagtaatcagtattccataataagtttgtgttttacctgtgaatggttatcagccttttagagactatcagtaagaaagtgatttgatgagatttgcgtcttagaaagattaggtatgtggcactggggaggataaacaggaagtatgcatgactaaaatcagtaacatcgtttggaaagatattgctgtagctcgtgtaaaagatgatgaacatcaacattttagtgagggaatgctactgagccgttgaaatcttcccagtaagacatagaaatgattgttaatattatttaactatagttaatttacatttaaataggcacatgtgactaatggctaccatcttggatagcagaagtccagatcttaagggagatgtgtggtctggcaacgtagattttataggatattttaaaacatatgtatgtttttcagggaacattttaaacagcaagtgatgataagaatagggagagtgatagataaaggaaagagccacaagcaggaccctggtcatatcaatatttcagctttagactgaagaaaaggagtctgtggaaaccactgagagaagggtcatgttgaggtaggaggtggagcattagggaagactggcagggagcccaaggcaggaccagtttcatttcagcaggcttgtcaccagaacctactgaaaactcgtaagacttgaaaagagccaaatgtatttggcaactaggaggacatgattaagaaaaataaaatttatccatgatgaggataaacaccatgttagagagaataaatgagtaaatggaagatgagcttaaagtttataaaatacagaaaatctgagctaggacagaaagaattaccaaagataattacaatttaaaaataacaatgagaattaagtagatttgtgacatgaagggaagaaggtttgcagaaaggctttaggtatgaaagagagtgaaggttggtatgaaatattagagaaatgggaatggatgaaagctcagacagcaagattagtagctagaatgaggaaagaacatcttttcttttgaaatcagagggaaagagtaatagattgatgcgtattttctaactctcagggtggagtttcaaactttgactattacacattattttctaaaagatatgttttctcaatcccatgaggtaaaaatccagcacaataacattgtttgccctgcctataccattcccctcgatatgtgtgttttaaaaatgggaatataccattgcaaagaagatgagaaaataaaattaaaaggaaattaaaatggagatagcgcttagttttttatgtggtacttgttcaatctaaggggcttgaattttgaaaataagtataatcttgatttccatctttaaaatcctaggataaaatgtcaaaatattttagtaaagtagtttttgttgttgttgttgagtaatgtaatcttatcttcatggtttacagaaatgtccctacaacttctcaaagaaatttagtagttcattgcactttgacatcatgaaaacaagagaaaattcatgttaatttttgactggactaagtcacaaaacagttcagtcatatgcaatattttttatgtaacacttgcagctactgaaacgtatgtattgtttcttgcctaaggaaattagaaaaagatctggaattcagagtgatagcaaaaatcagaccattatgcttttatgtggagtatatgttatgtgaaagattattgagataatatattagaacaatatcaagaaaaaattctaatcggattgcgtgtgaatgcactatttggggaaaagttatttcatattagattccagacaaagtacaaatgcaacttacatatgtgtgatagtatcttaataacaaataggagttgtttcttactgtgtcatgagattacatccgtaaacatgtatcttttcacagtcaactagggaagaaaataaaatgttgttcagggaaattcatttcctctttagtaatacatactaaagaatggagatctctctatattaaatattcctttcctttgtgttccttggaactcaaattcactgttctttccactatataactaaacttatcctttaggcaatatgccttcagatacatataaatatctaaaatttttggttgtatatctttatgttgcttagaaaactgtagttttcatacttagtgacgattttaatttctctttggatcaatgtcaagttgtagctctctctaccttcttgtttctttttaatcctcaacacatttaggggaaataatttttatttttcataaaaaataacatctcagaagttgaattatttccccatcactcctcatctcttccaaatcttctaaatataatttgaccaatcagtcattccacttctggtgttatacaggagacattgaaatgaaagcattcttaaaattctgcagtctcatgggggaagaaatcatttcccctccaaagtttattctaaaagtggaggaccaggagcaatgttttattttgacattataggtcaacatatttgcaatactgggtctcctgttctttaatagcctttctatccagtagcaattccatagatgataagtgtgtcagctcagagatttcatcagccttatcagtgcctgctacttgctattgcatttatgtagcacagttttaaaatgttaaactttattgtttttgtcctccagttagtatccccgcatctcaagtaatcaaggacaagcccatgtgctgaaaaattatatgatcttccttactcccttatgttaaggttttagccatcaaagttgttctctctctctctctttcttctctacgtgtgtgtgtgtgtgtgtgtgtgtgtgtgtgtgtgtgtgtgtgtctttctccctgtgagtgtttttagattccattgtaaatatttaaattttatttattaaatctatttacattttaaacatatttaaaatctgtctagacttcctaacataaattcttatatacttatttcaaatccaagagattgaaagaggtcataaaagttaacaaaagatctttctcagcaccaatgctttcattcttaacttctcagccattccttggtaagtgttgatttcatcactttgtggatagagaaatagattacctaatgcaaatatcccttacctcctccatctcttaattacagtgctgactaaaatatgtctctttttttgtgtagtgtaactctttttaaaatgaacttctgtggtttacatttgtggaagttatctggattaaatgaaatagatattagtaagcttaatttatttttatcttccctcttcctcaaagttctccagtagcttctgttttgtccactaatccctattgtcactgacgttctgtactttgacaatgagaaataaaatgctgttctctacctaattctttatttgatagtattattaataaaattaactaaatgaaaaaataaaataaattagttttttcattctctatcgtgagtcttaaccttgattgaatcataattcacctgcagaactgatgtgtgcatgcatgtgtgtaagtgcgtgtgtattttcattttagcctgtattttgggtgagctacattcaaacaccagtctcaagctaaaaatattattggtaggaaaacttaaattcaactctaaaataaaaattcatgtatttttccaagaatcatggataagaaagaactgagataataaagggtatgcataatgctgaaattgaatataaataccagtcattattattatgaaacttttggatgtcagtcctgataaaattacactgtgaaggtcatggcattgatcccacacactgttatagactctgacctgggaatgagaaaaaaggtgccaaggaagggagtgtcaaccacctttccaaggccaacattgaattggcatcactgatgcaaaaaatgggggcaatcaggatcagataactacaatgacatagatagaatcataatcatcttgctttaactcaagttttagtgatattgggggaatattaaattctccttgatattctataatataaatgctattcctgttattctagagtgagttaaagcatccccacaatactaaagttataatcagccctcaagcaagtaagtaatttgcacgtctaaaattaatacatattgaacactcactttttgcttagtctgtgaaggtagctttacaaaatactatgtttaatatgccagagagataccagttgtgaaataatagtttttcatattagctcttaaacacctagatactttagaaatcatgatgaattatctggatgtcaaagggtaaaaattaattccttgataattaaaataataaattgaggtaatatgcaaacaatgtaaaatttcccaaaataaaaatattattaaatataatcatatttgttaatgtaatttatgtttaatctatggttaaaacattatacaaatcaaattcatttactcataaaatgattagggttgaaaagatcatttaaaaagaatatgcatgtttaagtacctagaacaccctattcattttaattttgcagagcaaacatatccaaataaatatgtgagttcaatttcaataacatagaaaagtaaaataggttagataataagtatgcaagaggaactaacagcaacaaagaaatcatactcaagatgtaatactttttttctatgaatctctatcactaggacgataccagatcaatatagcttccagtacctttgtgaatttattgtaagatgagctttcatttacttgaattaattttctcatattcaactatatccttactttaacttctaaataaaaaaattataatgaatacattcctgccttgtggtttattgttattttttaaaggcagtagaatgaagaaaataacatttttataataaattctctctccatttaatcctttccaaatcttcttctggaaattgaattgcttagactcatcttgatgattaatattctcagtacatgtctttccccctcaatgaactcacagagagaaaaaaatataattatgttcattgggctcagtatattttattgacattaatgttgttaatttacattaactttgatgtcactacttactagcattaagtatagagggcagggcacagtggctcatgcctgtaattccggcactttgggaggccaaggcaggtggatctcttgagcccaggagttcgagaccagcctgggcaacatggcaaaaccctgtctctaccaaaaaaaacaaaacaaaacaaaacaaaacaaaaaacaaatatatgacaaattaacaatattttgcaaacataatggtattacataatctcaatagcgtttccacaattagaaaaattgacaatgaattatatatttgaatatccttggtctagttttgagatctcaaaaatatggcctctgatactcaaagtgattgaaaactatatataattacgataaactttgtaaataatttccaaaactataaatgcattctctgataaaattcactttcagagtaactttttaaatagtttaccaaatgttaatctctttttatttattttaaaagaaaactttgtttccacataattgaacaactatttagtatttatattgttgaagaaaaaaaaaaaccttaactcttaatagttactaataatggtattgttgttattgatatcactgtgagttggagaagtatgatgcttaacaattttaaaagcatattaacactaatctttgtgttttttgtttctactttcagagacgaagaaatagcatggcatgaaacatggctcagttctattacaaaagaaatgttaatgctccctatagagaccgcatccctctaaggatagtaagagcagaatcagaactctcgccatcagaaaaagcctacttgaatgctgtggaaaagggagattatgccagtgtcaagaaatccctagaggaagctgaaatttattttaaaatcaatattaattgcattgatcctctcggaagaactgctctcctcattgcaattgaaaatgagaacttggagctcatcgaactactcttaagctttaatgtctatgttggagatgctctattacatgctatcagaaaagaagtcgtcggagctgttgagctgttattgaaccacaaaaaacctagtggagaaaaacaggtacctgcaaaaatacagtttttaatttattttacctgcagaaggttttttgttttttcttttctttctttttttttttttagattttcaaatgccctgaaaatttaagaaatataagcttcaaaatctgaactatattataacagaaaactactattaggtacacccttcatgtcctatgatagttacgtccacttgcatttcctgccctggaaaatcataagtaattgtgaaagctaaagcaaaataaagtaatttaagtagactgctcataaattggaaacatttctatgtaatgctcaacataggttgctcgtaactttatgtgtatgtgtgggtgtttttcctcttgcctttcattttcttaattctaccttatcagagggtgaattattttgttattttcctatttaacctgcttgcctgttctgggcttctgcagcttactgcaaaagtgagttgcaccatctaattttgatattatcctttaacaaactctagtagattcttttaaattgagacttaaagaaagaaacaaaaaggattactatgagatagctgaactctgactgtgggcttaactacatcaactttactgatggtgcaaatgtagctataccttataggtatcaacagaaaataaactaaaatggcacacaattataaatacaatgtgtgtttttctctttctctctgtctttttccactaaggaagtggagacatcatagacaggaatgaataaggagtctgtttttgtctgtctggactcttccctttgtaactgccttgtgtctgaattatctatttgatcctttttcctttcacactgtactcgtcacttccttgcatcaaggctaattgactaactgcaaagacactgcagattctgcagcggttcaaaaatctgtcttttaaagtaaaatcttataaaatggatgttattttagctctagcaaattctagcctatttgataatatacacatctcggtctctgcaaacgctagactgttaggaggtgtgacattttttttacaagcaagctctctttgctttcctagaggacttttatcagaatctttgccattattaggaaaagaactttatagctgagtgtccctgtctgctgggaaaagcctgtgtttttatggtcccttttttatgtttcatccccattcaacccttccccttacttgaactaagactttgataaaacagcactccacagcaacaatacttttctgcttgttgctttgctggcattttgttgtttctttcataaacggttgtttgtggattactctcattatattggtaaaagtttactgctacaaaaatttgcttgtttcttgtattctttcaaacgtgaacaagccttgattggggtagacaactaatagtaatatccaaagacacatttcatgttatataccagtctttcaccactaaggagatacagaacacagacaggaatgagtaagagtctgtttttaatctgtgtaagtttaggtgctactacttaagtctccttgtggtactgaaattctttccacagctgtacctctcaagtatttgcattttctaatagcaatgatattatattgtacactctcttattttatgtctatataggcaaccataagacagatgttttggctgtgatgtaaatcattttagattgcagcaagactatagaatgaaactgccatggaacatgtttttgatgtttattactaaagaaccttcttagttctattttctagagaacactggccataaatttcagtgtctctttagtcaatgacatttgtactgaccagaataattttgtgtctggagaagatgtctgctattatgagagtgtttgttggaagatgttcaacttctgaactaaactctagcctcacaagtaggtcctggctccttataggcatttgatctggatcctgattattaataaaaggcagtcaaggtttgccatctgccaggagtctgaaatttcccaggccatgtgtttctggaagatttctcttatatcagtctgctggccaagaattccttttctatttgtacattctagaattcctcttcagtgaaggcaccgagaataaacaaaaattgtattattttgtttgaactttataattttgaaagagtaatttcaatctccctcagaattcttggtatcttgcacaatgaaaactgaagtttcagcaacatgaaacgtgcatagcacacaaagatggcctcagtgcttgggccgtatcaaatcccattagagcctggctgtttatttgtgattttctttggtaattcatttcctaaggaaggtcaacatcttttggaatgacagttttcataaatcactgtgttgtaagtagcaaatatgtccttgataggacttttttctctcataaggtgtaattcctcattcttgtgatcattgaaagccatttgtgttttattttaattcacctaattttcatactcatggtatgcccaaagattctgggacacgtcatcattcattttattgaggtcattgaggccaaatgataaaacctgaaaacaacaatatccaactgaacaaaataaatgtaacatcctaaaatgagttaagaaagaggttctaataaaaagaaaaaaaatccaaatctgatttttagaacacttagtagtttttaaatgtgagaaatgcatattcaaaatatactctttcagaaatttgtcacatattaacttatttctctggaaaaagaaagatttcatagtcatcctcaggtcatgggagctgtgagatttcagatgaatttgtctacacttaaaggctttcacaggggaacaatttccagatgcctgctctgccaggcctcgtcctgggccctgaggaggagacaccgttccttttctcgagagtcctaaggtccgattgtgaatacagaaaagaaaagtatcatgggaatatgaataaaggctgtcagaactgaagagatgaaaatgaatcctcagaaaatgatgaagttaaatcatctggatttggcaaacacaaaatgttagtgggtagagggctggagaagggcttgaaggaaaaaggggaagaatgttgataggtttataccttgaaaaaattaacaccattaactgagataaagcctataagaaaagacttatgagaccaaattggacatgcgtagttttttgatttgttagtattaatacctaggagttagttagaaatgttggatttaagaatggggtctgggattgttatgtagatgataaggaggacattgaagcaaataaaatcaccttatcttcctgcagttctgacattggttttctttttgaccttatacatgttttacagatttgtgatttttagtatattaaatgattttctcaatgcagcatgtaatgaaaagatgcaggtctttccagataaatagatgggtatagatcattaaatattttctttcatatttaaggtagtccttcataaatcagggtattgaatttagttgggtttttttttttaatgagaagagtaatagcttatttctttcccataggagacagcacagagagcctctgattctctacactaagcaggaatcattgcactgatagtctctgatgaatttactgaacttggctttaaccttcttgataccttatttctctagagggaataactgagaatgacttcttaaccctcatttcagtccattgattggtaacttgacttttcattatttttagcagagcttagatgtcttctaagtccagatttaatttcagtttcagctgcttcagtaaatgtttatcagaagcagaccttgcttttcaatttttttgttagatcagtggttgtcaatctttagcatcgtcactggaaaggcttgttacaacacagactactaggacctacctgcagaggttctgacacagcaggtctgaagtgaggccttgggatttgtatttctagtgagtaccccaggtaatgctaatgctgccagtctagcaacagtgctttgagaaccactgattcagaggatgttgcaggttgtagagaacctacagctgtatattttatgttagatgtctcatactatactatgctaacctggttttcaggaaattttgactcattcccttaagtactagctgttaagtggtatttaatatatgagagtttcccaatttcagtaacatccttattatgtattcccactttggaaaaaaagactttgctatacattataaacagtgaagattccagagtgattagctgaagaaattttggttttaaagttctactaaaaataatgcagggtattttataattgggaggattcttggagatcaacctaatcaatcacctcattttacaaaggagggacaggaaaggggactcaattgtgcagtgggttggccagactgaaaagacctataaattaatagctagcaaccaaccttgatatagtctggataataataaaaattgtatgacaaaaaataacaacaatattaatactagatgatattcactgagtttgtcaccatgccagtaactgtgattagaattttacttgttttatctcacttaatctttatattatcctatgaaagtaggtcctattgctatctccacttacaaatggggaaatgaaagtattaaaaggcttaagtgacgtaataatatgtcccagatcacaaagcaaggaaataccagtgctggaactcaagagtctctgaagacatatgctggtctggctttagccactgcatcgatttgaatgggtgtcatttaaatcattaattacttatttgaattcaggatatgaattagacaaattttaagaagtctctggatgtacacattcagactgtctctatcatgaatattataatgccatttataattttgttgcccaataaatattaattgtgaccccagacactccttaccatggtgttgcactaagaaataacaaagtcattagaagctgtgaagtgctgggaaagagcacagagtgaagtgaagtgacagcaatgctggcttccagtccagttcaccacttactaattggacaagtgtctgaatctctctgagccttggttttttcttggctgttaatcaggcctgtggtctgaatcttacctacttctcaaagtctagtgatgttcaaattctgtaaaagtgtttttataaggtatcatgtaataatagtgttggcattattactgtgttatgccattatctctgtcttcctattgacaaacaaatgtacaaataacacaaatatgtgaaaagattaagcatcagcaatttaccctctagagttcaagacctcttttttcatttgaaaaatgccaccattgttgatatggtgtggctctgtgtccccacccaaatctcatgttgaatttaatccccaatattagaggtgggagctggtgaaaagtgattgaatcatggggtgatttctaatggtttagtaccatctccctagtgctgtcctgtgatagacttctcacaagatctggttgtttgaaagtgtgtagtagctcccccttcactctctttctctctcccgctgccgtgtgaagacatgcttgcttccccttcactcttctgccatgattgtaagttttctgagccctcccagccatgcctcctgtatagcctgtggaactgtgagtcaattaaacctctcttccttataaattacccagtctcaggtagttctttatatcaatgtgagaatggactaatacaattggaaacagaaacccaattcagggagagcaaaagaaagtatatttcagtttacttattttctttccacctcagtgcatataggagattttttttgacatatgtagtttcagtagatttgttaatacaattgtgtctttagaaacattgcctgttatgtgatcagaaaatcaaacagtctgaagtaagatattggtactagcatgttaatgcaaatatataacccaaaatatacactgctgaataaaaatatagaagattcttagtcgatatggattccagtaaatatattactgtctactggacatagaaatatgttctttagacaaatctaaattttttggaatgaatccacttactggctgtttcaagattcagttaccctgaaaaacttcacttttaactcttgtattcattgggttttccacattgggctttggaacaagtctgcaatcgcatgaactttatatggtaattattaaatgacattgtataccaagacagtctataaactaactcatagagccaccctctaaagaatgaaaacattttaacttctttgtggttaacccaattgaaattactcctttctatttgtttttattataccctgtttgaggtcaaatcctggatattgacagtaagtgagcctcaagtgagcctcaatatatgtgtaaccataacttaggtaacatcaaaattcagagagagagagagctaaagagagcaaaagaataagagttatagtatagtattaaagacgctcatttctccccataaaatacttatcccatattgagacatagctagatgagttatcaattatgtttctttatatatcgatttatcaataggaaagtttcttagactattttcttattctgccgttaagattaaaaagctgaaaaggatccccaaatttgatattttcaatgtagtcaatataaacaaatactttgaatgtctaaaaattaaattgaatcttattagtccacagcagggagtttaaaggctgttacagaatagagcatagattgtgtttagtcagctggcaaatggcagtcataagagacctgaaaaattctctcctgaaagaaagaattcttaaaagatggatcatgctgcactattagtatgataaagtggtttaagctacttggctattctgactcatatattaatacatcatttaacctccttagtctcattgacatggtttttgtcttgaagaccagcaaattataggtaaataatcgctttgaaacatgttctgttgctttttcctctcagcacaacatactataaaagcaaaaatattagatatatttggaacacacaggagtgaaaggcatttaccactctcaaaaaaaaaatcagataacacaaaacaaaaaagccacaagtaataaaacaaacctctaagtgtttagggatttttattccacaatatgaaaatacaggatgaggctcttcttctctatgtttaggtagagaaactgagtcatgtagtctctttaggttggcaggagtgagagagagagaaaatgtttagagagagagtttagagagagaaatatttagatattaatcttgtcttataatctcagaaaaattatttagtcctttgagccttgactttatcatcatggatgctgggctaatacctaggtgatggggtgatctgtgtagcaaaccaccgtgacacacgtttacctgtgtaacaaacctgcacatgtaccctttaacttaaaagttggaaattaaaaaaaaacaaataaataaaataaatagcaaaaaaatctaaacaaaagaaaaagaaggggattacggctgccagtcaccaggttctatgcctagcattgaaagagcatggtaaatagaaaactctgataccatttgaaagtgattatattcttaccctaaagcactttatattattatatttgattaaattaataatgcatgtgtgcattgaagaggctaaatattcctcaaagcaaataccctgtgaagttttagtgctagtataaagaatgagtttacattaaaataagaaagagacaaatgaatctttcatacgtgggttttgtcgaaaagattttgtggggtcattttattagagccctctaatccattattaacatgattaaatctaaagttaatagcattatgtttcagtgagcagtatattaattgaatttcattaaccataatactgaaatattaatcatttaggaataatagtaagtcatataaacactgtaattacttgaatacataacatgttaatataattgggaattatgaaaatacatattatgattagaaggctcagtaactgttttcaacataccctttctttctgcctgctatattcacttattccctgattacaggcaaaatgagtatcattttgttatcaaaacacaagcaaacaaggatacaggtaatgcagaattttaaatgttctttttctcatagagtagaacgacacacactgggaaatatcgaaaagtagagggtgagaggagggacaggatcagggaaaataaccaataggtacttggtgtaatacatgggtaataaaataatctgcacaataaactcccatgacacaagtttacctatgtaattatctccacttgtaccccagaacataaaagtttaaaaaataaataaataaatgttcttttcaagaatgagttcttcaagcacctaaaaagagtgttcttattttcattatcacaatttatgttttatacactcgttttttaatcaatttctaaatatgtcaaagttccaagtctctattgtttgagtcatttattagaatcctttgacaataattttgtactgtaagctttgagtatgtgagaactgacttacagaatacagctttctgaaggaatgctaaaacccacccagaaggagtgggtaagagaaatttatagttgtaaatttgtcaactggatgtataatctctcttcccttaaaaaaggtgataatacgtaagtggagtgggcttaactttgcctaatactcatctccttaattgcaacatccctttttgatttctggagtccctgagggaaattatatacattcatttgacttggagatataagtttaatcactaagcaacactagtaccattatatataaatgtgaatttttgacacattaatatttggatgagtaaagtaaaaattagaaataattacacatttatttggactttatatgttatgtatttcccactctccaaaatatcagagaattctcaattagcaatatattgaataattttcttcaaaacataatacataatttcaaaaagcaaacagaccaaagtgaattgtaaatatatttcaatattttaccctagtcaccttaggtcacaataataaaaattgctaccaaaaaattcagtattacaatttatcaagcattctcttaagatcattctagattgttatcttatttaaacctcataacaacccttgtggtaagttctttcattattgtcattttaaaaagagaggtggacttccccaatgccactataagtaactaagtacttcaactgccatttttctccctccagcaccatgtgggtactgctaaggagttgcagagttcattcttgttgaccctagtagcagccttcgaatctttgttgaacacttgtttaagcagtcactactaagtaacaggggttcagtaagtgaggaataaatgcatgtgcatgagtggggaatacagaaaatgttttctttgactgtttggtatgtattttcacatttatttggtagattccttccacgtatattgaactgttatggataaaaaaattgcggctcagagagattaacttgctcaagtgagatttgagtgtaggtttctctgttttcctggcttttattcttattttgccaaattgcctggatattttgaccctgacatgtctagaaacctaagctcttttgaacaggtctagaagtaaaacttggccaccaagcagtatagagagttctttccatgcttttgatggagcaagtgtcctgaaattccttcagccagaggcccctgactgaatctttgcccctgactgaagcttgagtgcattaagttactgatttaacaaaactggttatctgattttctcaattcctcttagattgttgtaggaagagactggcagtaataagggagacactgctggcacattgagaaatttctgggaagggggaggcgagaacagcacattcacgagagtgtaggagatttaatgtcaagcaatgcacatttcaatattaccctgttgggcggcctgatgcagcaagttgacagactctgggaggggcccatttctaaactgaaacctgacagctgagactctgcagaaatagatcccgccatccatgttggaggcagttatttggcagataacgtgaacccttttttgatataaattataaaatatgacgtgatatgatataaatgatgaagttaaacgtccctcttctttactaccattataatcatatcctatacgcctcctcatactcttagaatattatgttgaaaatatgttttactttcctccactttgtgagcttcacaataccagagggtatgtgtatatatgcatatacatacacaaatatatttatatatatatacacatgcagacacacatgaatatgtatgtatcttactgatttatccatctgcaatgacatagacttgatttatagtaaaattgcaattcttcatttccctccctctcctctctttaacgtttgttcattggggtagtcctcttaggctttgcttgggcatgctttcccccaactctttttgacatttgtttattggggtggtcctcttaggctttgtttggacatattttccctcccactcttaggtaatagatgtagtagccccaattcaaagttttatcttttcctttccatacactaactgtgtgtgtgagagagaaagatttgggaagtgaagagaatccagtgagaagtttaggggaaatgagaatccgtcaagcatagagtttccaattgctgttgtagctttcaggaagtccatggtcctggtaaacctctcaggcttgatttgacgtgcctgggcagacagtaatttctctctcctccttgggaacacagctgccccctagtccaacttcagttgtctacaaagaaatcctcctcacaagtccacccttacctctattgtctccatgctatatactcttgaagcattgtgaactctggaatctgtcatcaattgtatctggtacctgtaaaaatttcaactttcatactctgttatctatataaggagctctcacctctttaacaaatgttggattcctttttttcttctacatatacccaacagatttcctaatacatggtatgtgctcagtaaatgttggctaaatttaataacaaggactcgagactccacaaagacttgctgatggtctattattaatttttctatttcttaggttataaaatgaatcttaccaatcaaaacttgttctttatatctgctttctttctgtagctcacacacacacacacacacacacacacacactcatgcacactataccttcataaaaataatgaaaaaatgaactgcttttcttaaaatcatagatagtttcttaggtttggaggagattctaaaggttatctggaacaatcacacatacagtgtctattattcatgctcagcattcttgatatattaatagaatcactctcttctgctccctcttcaattttgctatagcagagcagcaagggaacaacctaagatgagagaagtaggaaagtgaggacaagggttttggttagcaaagtttcaataaaggatcatgtattttctcatttcttcttataactttaaaatttccttggttgcctactgtgatcaaaatcttgttaaaacatacttacaaatgagctcctgacctcaaggaatctaattagcaatcaactgcagttttagggtaaatataagtaattatgcttaacatgcaccctcacttttttctgttttctatacaatattggtttcccaattgtattcacatctatcttttgtgagagtaggctaatagcacctaatacctaataaatagccatatcaaattttgtaagacacagaaattaaagtaattcaacatcaataaaagaagatatagacaagtaccattgtgtttctgtgaagatggtaaaattgtattaaaaataaactatttcgtggtttggggaaaagtgtagtagattgtcatattaggcggatagtccattgcagaatacgatacacgcttcatcctgaatggaatcaatacgaaatattttattatgcacatatataactattaattctatcaataaaatgcttaaactttaaaaatgtgtattcgataaattaatgttaaatgttgctaattcatatttctcttgcatactttatcctagaacatctgaactcattaatcctttatcatctgaagagcttttgattcccctgacctcaacttaaattaccagccttaagaaagtatagatctagcttattccatttggtgcttttatgctaaatttaatgcttggcttggtggtaatatgcattaaatcaagggtttcagaagcacctgttttggatgaattttctctttactgtatcatgttctatttattcccaacttagtctgcctgattctctcaatcaaaaagcagaatcaatgtctaaccttaaaatcagagataattaaagtgcattttgacatcacctttaatgtgatgtcaccccattctcctaatacaaagtaactcctggagtcatcaccttttacagatatgtggaaagtgaagcttagagaagttgaggaaatttaccaaggactactgagattattagtccttgagtcaggcctgaaattcagtcatatttatcatataaattttcagtcatatttgtcatatttatcactttagcctcaatcataaagactttatgaaacaggaaaaaatataaataaaactaaatattttgaggtttgttttatataaaaggaaatatttcagggttgaaaatgatcaggtttggaatctagaaaaatatggattcaaatcctggctccacgacttactatttgtgtaacctatttaacctgaaacagaaaatggctatattccacaattattgtgagtattagaaattagaaaaaattcatgtaaagtgcctagtatatttagatctggtttaatgttattatcgtcatgattattaatttcagaacgaagtacaccagtttgatctatgtctaaagattcacatttgtgtcatgctttcaggttgttaggatcagacttaaaatatgctgatgcagaatataagagacaaacttgttgcattctggtgatgaaatctctgaggataggcttctagatacctgcatagtggttaggagggtgtaaatctgtgaatgattccctggagccaggaagcatgaccctgagctaaaagttgtctaaaagtcaggaaaaaggaaatgcaccaggattataagacagcaaagtttgaataaacataatctaaacatattataaatcaccaaacaaaatgtagcctttctctgaatagagaaagagaaggaaaaaatcatgataaagggaaataatcagagttaatcccatagaataatatacaggttcccttagggatattttaggaaggatgttttcaccaaagacagagcattgaaattcagtattgtcaatgtaagtgtgggatcgatgttcacctgttgtcctatctttttttaataaatgaggtaaagcagatagcttcctttgaccacagttaaggaaaagactgccacctggtgaatatttgaggctttcaaaaatatatgtatagtttcaaacatctggctggcaaaaacttaaaagtaataaaaaatattttaaattatttttctttacttttcagtggattatagttttttcactatgcaacactagcagaggtttcgttaaaatgctatcaataaaattacaagtttccatgaatttttgcaccattttattaactgcatcttttataggtcacttaattcatattaaaagttacccaaaaaatgtgaaccaccatgatctatatttctttgggtttctttttgcttaattgtctagcaaaatgaattttaaaattacattgtaggatgaaaataatactaatcaattccactcactgtatacctgatccaaaaagcagaaagtaggcaaaggttgtttttcaatgtactggcactctactgggagtctttgcttcttcctaggatttagctccttcagtatattttctgtggggcatgagaggtgagaaatcagtccctaattttttttcttctagtaaaatgttgcccccgaccacctatcctgatgtgtgtgtgtgtgtgtgtgtgtgcgtgtgtgttcgtatgtgtgtatttgcacattaaaatagaagttaagaagtctcttaatgtcttagctggttgctacagaacttgtaaattgctaaaatatttcattcttgactctaaacacttgagttcaatagagaaaaaagtcctttttctttctcctcccatgaatttatcaacatcagttcaaaaatctgtatgatattttctttagttgtgaaaaaggaaagccatcattccatcaggaagagtaagaatgtccctccaacagttttcttttgcctggaaagccctgctacatggtaacatggctctccgcgtgtcttttttaattcccttcacactgtcaattcctagaatttttccaagtgttatttctgttatttttgtgcaatctcagaagagaagaaatttttaagacaatttattttggtagcattccttagttttatagccatatttttaaacctgaagactaagtttttgtggctgcaccttccctgagatgcttaccgatcaatacatcatgtgatattggtagttcacattattatcctcatttaccttaatttgttaattcttctttatggagtttttctcactttagtttgttccctcctatgattacttatatctaaaataataaaactcttattagctcttgatgttgcatttgggtcttttgaaataaaactatttttcagtccattgaactgtgatggtctttttagatactatttatttgcaaacttaagaataccagtctattcattaggcataaattacactgtaaacaaaatcttagtcttttctgttttcttccactagctacataattctatgtacatcctaggtactaagtaatagttttgggagtggaaaggtagatggatgaatatggtagatttaaaaaaccttataattattcatgaaagtaaaatctggcaaagtacaatctggcaagattaagtcaaacatcaaaggtcttacaggctttagttaaggtaacaattctgatttggatcacttccagaatgaaaccaagattattaacacctttgttaagaaattatgtgggaatatatatatttttcttcaatttgacctctactacaagacaatgctgcctaatattttaagtggagtacggggttctgaggagccttccacacctcgaaaagttagtcccatgtatagcatgcagtcttctttgcagagattgcaatattctatacaagtctgtatttgctaaaaatatatgtatataaagacttgctcccaattttctctacaaaatacagatatctgtgtatatatagatatatatatatatatatgctgaatctatatctctggggagtgtgttttagagtgaattttattttctccttttttcttttgacattttaaaaatctttaagcaatagaatatacagcttttttagcaggataaagtcagtgctgtctcaaggactatactgcttggacataccacaaaaacaaaaggcaatgaatgagaaggaaattattaaatacactggcagtttaaacataaatatagatatgtttctcagaaaatcattaattatgcagtgttcaactaaagagtcataaaatgtagaaatcttacacccactcaatagactagttctttcagtattcataatctaaaattttatctaatattctgaaatttactttctcattaatagaaaaataaaaacaatcacaaccattttctgtatctttatttttaatatcattagagtaaaattactttctcctccttacatttataaatcactctgccactgcctaagcactttcatcatattaaggtcacttagtcctgtgagtagacagtcagtgacgttttctctaaaagtgaagctagcgaatgatgtggtcaaggccatgtggctagttcgtggatgaaccaagatcatctaattcctcagttttatctcaattccttttgaaataaaagacccagccacatgtctactgttagccaatcataatagccaggcattcagacttcctaccctacacatgtatctctgactttgctattcctcattcatgaatcattctagttcccatcctagcattttggaccagcacattttttcaccaggatatattatccatgtatttcctctgcatttcttactcccaaaaaggatccataggaagtttttgattattttctaaaataatcaaatttgggaaaatccctgagagccaattttcccggtttagcatagatttgtttttaaaagtttgcgttaatttcgttgcaacagtctattaccataaagaattgctgaggcctcattctctatacatccacatgctccatattctgcgtgttctacattcaaagtgggttaagatgtgaggatccatgtaaatctttcctactttcctgctgcatccaatttagagaattctcttgtaatgtattgtcaacaattctaggagtctcaggccatttgaaaattacaggaaagcttgatagtatttgtttaaaattaacatatactaagatgtatttcactgcatgtaggcttcattagaaccttcaatcataggacttaattatatcaactttcattcattaatgtaaatctacattaattcatgtgctgcatgctttaaacaaacctaatgaagaaaaatggaaagtggaaaaaaaatgattcatcttggtgtggttttaatctctaaaggacttgtttttatttcaaagtaaactatggaattatttgagtacatgttcgtttgtgcatttaaaaaaacatcaaatatatctagaaaagagaaatttacaaagcatatgataaaattaatcaaaataattctatttaacactgaacaataaatcagcaaaagacaataaagcacttatgcaatcttctatatttaatacagatcaacaaacgcccttcatttatattggaactgaatccttttggaaagcaatttagcaatgtttagtgaaaggaaaaccaaagaaaaaatttattcatattcatacactcattctctcatacagtcaaaatacaggagattttaatatacactctaaaattctaggtggtaactagctaaattactgtgtattttaattaaaatattgtgtaactattataatgatgttcaaaagactttaaaatctatcaggggagaaatacatgtcaaataacagctgaattccacatggattaaaagagatcacactgtaatcaatttaacatattgatgaacattaaatcttttgccagtgttactggtttggttgcacatgaacaagactataaagcttaaagtaagcagatatttagcctattaaaaaaccctgtggacatgcttttaagcctagtgttcattctcataggttggtgccctattttaatgaattaatacctggtctacactgaacaatattgggggaaaagacactgatagatttgataatcaagatgaaagtaatattaacaatctttatagtaaaactccacacagaaattagaacctggctaaaatatttgaaatgaatatgatagatcaaaaatattaacatatttaagacataataaaaaatagataagccctaccattcaaggaacatactatttcaatctttcacaaatatttataatgttataaatatgccttaccatcaaagcctgaagaggacaacatgagaaagaaaaaaaatatgctcatctcactcaaaaatataagtgtaaaaatcttaagcaaaaattagaaaaatatagtaatttatttcactgccttaacagataaaggtgaaagaaacacatgattctcactagatgcaaaaaaaaaaaaaaagcatttgataaaatttatatctatcaatgataggggaaaacaaaacaaaacaaaaaaaactttagcaaaccaagaatggaatagacaaaagatattccttaacttgattaaaagaatgtaacaaaaaatctacagtttatatcattctgaaaagtgaaatattaaaaacattcatgttaatatccgtaaaatgagctttctcattattactttttatgcaactctaccggaggccctggtttgaacaaaaccaaacaaacaaaaaagatatgaagactgaaaaagcttaaaagtatgttcagataatttgtctacataaaaacaaaacatcatctacaaattattgtaaccaatatgaaagtttatgagtcataacataaaatattaatatataaaattcaaatgaattttagacactaatcaaagttggtctatacattataaacactagcatcaggaaattataatttaaaattatatacaaatgtataattatagaaaaatgtatataatatatacttataaaaagagagtatttcaacagtaacaaacatttgagttgtctaactgaacattgtgtgggagtttcaagaggaaaaatagaaaactttattgaaagccccttcatttctagctgaaatctgagtctcccttgcaggcatccgtcacaccactgggccttgttcatactcagctgttgcttctttttaatgtctccaccccagtagtaatattctatggaatctcattgcttggggattttagcatcagatttactgtcatgctcctcaacaatggtgttatccagattctctggctgtacacctggacaatgctagaattacactggcctccttaacctactttccttcttcccagacatttatctttaacttcatcatgcgttagtcacctcctactatggccatacttggattcggtgttatcattaactgttctacctccaacgtcaaaatttcttccctgctcactctatctagcacccacgcatactccaatatgttctgaccctcatcctttgtgatgttacttccctgatttaaaattcaatggttcatccttgtggtttcccacctgaagacaagtttgcctcactcattttgtaatattatctggtaaaattacatttttggtttagtccaatctctgcctattgtatgcttgtactcaggtggccagagagggctgaggaaagcatataaccatttcagctagttttactctaaaggcatgaccactaatttcaagtgggtgctcagtggtgcccagcaatcttactacatttcctgggtacccttccacttgcctaggggattcattcattttttttctatctatcttttcttcaacaagctccccaattcttttctcctcttcctcaggtgatgcctcgttttctattttactaagaaaatagaaccaatcaggggaaaactcccatatgcttccaccaccatagctaccaacctgcctcaatatatgccttagtacttccggatttcacactctccttcttttttgcctactttaccatctattttctcaatatcttttactggtccttcctcatcttctccatctctaaatttcgaaatgtcagacagttcaaattttcaacaaacaacattttatttaaatgtcatttagtagattccccttcagtgtaatatatatacgtatatattatataggttttttttaaccattcattagcctttactattgcacaaaaatcctgttcaaggccaaattttacccttgcattactttattaatgttaatccaaatttatttaaatgaaaccttataaaggattccatctaatcttaaccaatttgaccataaggtgaaatctttacaaatcctttataaccccttttgctaaagggcagattagtgtcttttttttattttattttattattattatactttaagttttagggtacatgtgcacaatgtgcaggttagttacatatgtatacatgtgccatgctggtgtgctgcacccattaactcatcatttagcattaggtatatctcctaatgctatccctcccccctccccccaccccacaacagtccccagagtgtgatgttccccttcctgtgtccatgtgttctcattgttcaattcccacatgtgagtgagaatatgcggtgtttggttttttgttcttgctatagtttactgagaatgatgatttccaatttcatccatgtccatacaaaggacatgaactcatcattttttatggctgcatagtattccatggtgtatatgtgccacattttcttaatccagtctatcattgttggacatttgggttggttccaagtcttcgctattgtgaatagtgccgcaataaacatacgtgtgcatgtgtctttatagcagcatgatttatagtcctttgggtatataaccagtaacgggatggctgggtcaaatggtatttctagttctagatccctgaggaatcgccacactgacttccacaatggttgaacaaaaagtcaggaaacaacaggtgctggagaggatgtggagaaataggaacacttttacactgttggtgggactgtaaactagttcaaccattgtagaagtcagtattatatagttttgaaaaagaaaagtgaagtctgtcaactaaacaatctaagagttagtgataataaccctcaagttcctttagtgattcatcctagtccaacctgctggtgatttaaagttgctatttgtttgatgtctccttaagagttgtaatatatttctccagtatttacctaaaatacaaataatatttaattgttattcctgatgtatatatagcagtacacaataaagaagcagatgccatttcaggagatacacagcttaaattttcagcaacaaaaagcatgcattctaaaccttgacatctacacttacaaaatcggcccgccaggaaattattgttctacctttcagatgaatcaagcactataattgggactgtgtttatgtgaggagaaacaaatgaatctggtcaaactgaacaagacagttttctggtcttgctcctaacaatcctagtactgtcacataacactagtacctccatgttatttagtgatttatagattacaacatgctttcacatttaatcttcaccacagccctatgggaactaactttgagaaggctttgatatatgtttcttcagttcttgttccttaatgagaaatattttgaataaatgactacatttggaaatgagaaaataaaaaagtggggaagttaactggctttgtcacagctagaaatggttgaggcaggatttaacggacattttcctactctcgctacctgagctgttcccacgatgtcgcaactgccttacctagaagacataacatctattggtgaagaatttagactctggagtcaggctgcatggatttctgtatgaccatgaggaagttactgaacttctctgaggcctgtcattctcttttgtataaaaagggtaataataatagtacatgtaaacattattttgaggattgactgagatgaggtataacaagctccccacacagggcatggcacatggcaagtgtttcatacaggttagctattgcttatgttatcatcattagactccaagtatatttgcacttacaacatcaattaattgaagtagttttagccagatccttgttcatttgtatcaacacgtgtcctttttctaagataaatctgtcattcaatcataggattgtatttactgtgtgccctatataccttttcaagtcaactctataagtctttgctggtatttttaattcaaagtagacagaaaataggcttccaataaagaatagtctgtgcaatttcaaatgaatatttgctttacaggaagtaaaagtagttattgatattaagttatcattatttatactggatgcatcactaactaaagcaggatgtctaattgtttggcttcctttgaccacattggaagaagaatgtcttgggccacatataaaatacactaacactcacaatagctgatgagattatttttaattgcaaaaaaatctcataatgttttaggaaagtttgcgaatttgtgttgggctgcattcaaagctgtcctgggccacatacagcctgtgggccatggacttgtactaaagcttgggtaaagttagatgtatcttgtaataagagcctttgatgggaaataagggaatctgcaattgtggagtatgcactcatcctccttactattcttagaaactccttttctgaaaatgggttcctcttgacttgtaggaaagttataataacttcccttcccccttcctccattaaaggcaaaaaagcagcccaatgacagttcaattttacaaaaggacgttataaaaattataatacttaagatgggttctgagtggcagaactggataggtgagagggaaaaggcaaacaccaatttaaaaagctgtatggaaagtttaatggtgaaatgctcagaccatgggaagcatactgaagtgtagtgcacagtagattttaatatagagattgacctaattatagaggattttgcacatcaaataaagtagttcagatagagataatactaaggacaatgtctgatagaaagtagaatctcaactaatgtttaaagagcctaaaataaggaatctttatataaataattattctacaactctctagcatgacaaaatgaaacttcaggagcatctctctggaatgatacatacaacattactgctaattcaaatattcaatggcatcacaatatttcacacaagaatatgtttctacaatttgttcaaacttttctcttttgaaaaacattgaggtgatgtccaaatttccatcaggacacaaattgatgaaataaatataagaaatattctcattgtccctgcttttctgtaggaagcatttcctgaggtaagacttctcgaaatttgtataaatactgcatactctcccataaagctgtaataattttatccctctagctttcaatgaatgggggagcctgtctccatagcttttcaaacttgaccatatgatggacaaatatttgtatttcattattgtttttatttgtttttccttgactattgagaaaaatcatcatttcttatatttctggccctttgattttcttcttctgtaaaatatctgcttataactgttgatccattggattgcttataagattttttatttacattttttctgtgtgtgatgttaagtatgtctcatatgttgcaaatgcattttattgtagtttagtagcttatttttttaactttatgtatgtatggtatccttggccattccactcaagaattgtataacaaaatatgtggtttttcattctgtgtttacaatcttgctttaagagctctcaatctcagggcagacaatctcagggcagacaaaaaaaattttgttgccttttgttttttacatttaaatatttaccccatctcaaatttgttgttatgacaggagatgaatagcctaactttgcttgggtagaagattgttttagtgccagttagtaaatgaactgctttttcaaataaataaaaatttaacttttcacatataaactttaaatacataatcaaaagtaattctggtcaaaattctgttcaagtgattcatatctctcactatattcttgaattatagtctcaattttataattttttagccattcttggatatatattccttcatatcaattaatataacaatgttattaagttataaataaaacaatataaacaaaaatattctaatgaaatggtactaaatgcatatatttattgtaagaaaaatcaacataattctgatatgaagtcttcttttccactaacggaataatttttctatatttctgattttattttatgccctataaggttttattttttctataatctattcacacttattatatccattgtcacttaataatgtccaacttttttctttctgtatgtaatcagctctgttaataacttgtattactaatgttaagaaaagtatagatttttgtactgcatacacatgtcgaattaagctttattaatacttctaaacttgaagtctcttagtttttcaaaatatatgaccatgtaatttgccaaacaggaacaggttgtcttgtttcttaatattttattttctaatcttattgcattatatagaaactccaaaataatgatgagtaagataataagaataaacatttccatcttatttctaattttaatgaaaaaagttttcactctttattgtgagttttgctactggttttggtaaataatccttatcatttctaggaatagtgatgaaattcttcaaactctgtttcacatacaatatcatcacattgaaaaatattatttaccataatgaatgatagctaaaaatatcataattcctttgatacactgttggattcaacatactaacaattattttagtggtgtccttaccagaaaattttacattttattttcttttttgtttgatctttgtttatgtagaataggatttcttactttgttagcaaacaagccttttgtttattactcatttaaaatacaaaactaaagcagagaactgcaacaaataaaagttgttatatatacaatgattttaaaataatatggaagccaaaagtcagtaacttacgtgaatacgccaattacccctaactgaaatatacaggcccacatgtcaagtaaattaaggaagatctatgttgtacctaagagactcagtaaaataaagtgctattttttagaaaatttccaaccttgaaccctacccaccaatttgggatttccccagaatatatttaatcatacataattgttttcattactttaaccaaatacctggtgaatactatcagtgcacagactcatcatttgcttagaataagaaatttctctggttgtttatgcctcacttttgacttttctccaggtgttctttatctttcagtaacttttatttacattttagatcttctggatctttccccagatctccagaatttttctgcatgaagtaaatatttgtgtgtgtgtgtgtgtgttgtgatttatttcttcaacctgatactctaggacatctatgataatagaacattctggtttcttaataaatataaatgtaattttttaaaaatttcaaatatcatacattcctttccagaaagtcctccgaattttccaattacttctcctaaaaaacaactatctgctttgtgctttccagttaaaaattgtatttgtcttccaagtctaatttacttagacttaagagcttcttaacttagggatgtgctagatagaattcaaagatgtctgtgaactaagatgggaaaaattatatctttagttttactgacttctaaatggaatatgtaatttccttcaattatgaatgtaggccaaaagtcagtttccatagcagtgactgtgtctttgtcaatagtagaaatcatagatattttcctatcgtatcactattacactatatatctgatatatgtttattatttcaaaagtagtctaattatcttccagtgtaactttttatttaatgtactaataggcattcatgttaccacattgcatattttttaatgtattttacatatatttaaatatatttttatgtataatactatggattttgtttagaaatagtattctttctgaattagggtccacaggatgcttcagatctccaaagaaatccatggcacacaaaaatttaaaatctcctgatttagagccatatgtatgtaatcgtgccgaatttcttttaaggtgtttattataattattttctggatcaatgtttcatcagacatcaaatcaaactattagtgtatttaggccagtcacggtggctcacgcctgtaatcccagcactttgggaggctgaggcgggtaggtctcctgagttcaggagttcaagaccagcctggccaacatggtgaaaccccatatctgctaagaatccaaaaaattaagccaggtgtggtggtgcctgcctgtaatcccagctactcgggaggctgaggcaggagaatcgattgaacctgggaggcggagattgcagtgagccaagatcatgccattacactccaacctgggtgacagggcaagactctacctcagaaaaaaaaaaaaagaaaaaaaaaagctattagtgtatttaaagttgcaaccactctgaagaagtaaaaagcacaagtcttttctcttatccaccagtcttcataaacattctggtaaattattagccctaggcttagactaacaaataattttttgtctgtataagtgcaaatttgaattctgtttagtcttttaaagcagaagtttgagcctaaaataatactttcgagtttgtttagataagattgtaacctaacttattcatccatccatccattcatccattcatctatagatttcttcattcatatgacaaccacttgcttttgtataagtagtttgtgttcatgtgtgtgtatgtatgtgtgtgtgcacacatgtacatacatatacacacatatgtatataaatttaggttctaaattactgttgtcaaataaatttttaaatataactctatataaaattttaaatataactaagttgaaatttcttgtgttgatttgaattagaaatcaaacagtctctgtgtatgaaagagataaattttatacttataatcctgaggggtttttttaagtgttgcttttgactatgttagagtaaaacaatgatgctaaacacaaggggaagctaaagaacttagcacatttttattgaagcccttgaaaaaacaaacacctttttcataaagtttctattattttactatcaaccagaactttaaaaaggcatttgagtcacagaagtttcgtgttacaagggatattcctttgcatataacaaatgccccttactatctttaagagactttcacaagattatatagctaattaaacatagagccaggtgggtgcagtggctcacgcctgtaatcccagcacattgggaggctgaggtaggaggatcatttgagcctaggagtttaagaccagcctggccaatatagtgagatgctgtccctacaaaaatatgatctaggcgtggtggtgctatgcttgtagtccggctacttgggaggctgaggggaggtgggatcacttgagcctaggagtttgagaccagcctgggcaatacagtgagaccctgtctctactaaaaataaaaaaataaaaaataaaaaaattatccaggtatggtggtgctatgcctgtagtcccaattatttgggaggctgagggagaggattgtttgagcccaggaaggaggtgattggtgttcatgtcactttagttcagcctaggccacagagtgagaccctatttcttctttttttttttttaaagagccaggttaggacatgtatccatttattcttaaaatctagtgtatgccaaacagtattatgtcagtaaattgtttttactcaatataactattttataaaaactgaatttaatagaatgaatacccttaaattgtatgaatgtcacttcagaatgtatttctctccaaaaaatttgacttcagtattaataatggttcaaacatgtatattttagtgacagagataaatttctatgaggtttttgccattacttttaacggcaaaaaacacaattacttttgcactaacttaatacatttgggtaaaacatcaggctctggattttaaaataggtgcttcacattggtgctgagtcacttcaaggtgaaatatgtagatacattttaagaatagcaatcagttataagttaatggttgcttgtatatgtcaataacatttaatgctgtgtgttatcaaaataattcagttattaatgtaactaatcttgcagtaaaattgagaaaaatattgaagagatacatttataaagtttggacagaataaaagccaaagcaaccttatggttagttacacaatacaaaaaacagggggatttatttggtttaatttcagggtcttcttttaattgcctcttctacttttgttttggattgctgagtgaaatttgtgattcaataacttggaatttatttttaaaaagtagtttgtttggagtatgtggtttgcttcttagcaatgtgagtatataatttaatgccaatatgttttcctgggtgtaatgcctttatgtctatagattttacttgagcaaaataagtaaaacacagtgtgattttcatctgcagggttatgtccttaaatatgctagatggaaaactttataaatttgagaagaaaagttaatggaaaagtagtagttattgagtgcctacaatgacctatttattttatgtgttaggaaaatgtcctcttcacttgtaacaatggaaccacaaaaggaaggaggaagagttgcgtatgggagacattgaataaagcaaaggagagggattgagatataaaatagactgcgttgagaacgaagcgtgaaaaggggcagcaagcccattttctgggttttctaaatgtttgtgaggtcaaatgacttatattttagacttccttaaattattgaaacaggtagtaaagttgataattaactgataattgcctcagctgcagtcaaccagagtccctgagtcatagcttttcgctgccctctccatagcttcagtatcgcccattctccatagcgggggtgctttgaggtggcaggctcggcttccctggaaaaccagtaagaaaagcctctttatcaacccttactcatagtcagctgaaagacagaagagagagggaagggccattggccctaattggatgcaagggttctctgaaagtgcctttccagtgctagaacgtgcaaatttgcattagcagcttctgcaatgcacttgtgttcacctttccatcccagacaagtgaacattagggaaacagaaatctgaattcagaggactctcagggcatcatctggatgagatctcttcttctctgatatgtttgctttaaattaattctacctcatgtttctgtgttctctttctttctttctctctctctctctctctctctctctctctctttctctctctctctctttctttctctgtctctcatctttcctgtctggcagggtgcaatcatatcctttccttttccatggctacaagtctaatccaaaatgtaatagctatcagccttctttacctgcctccaaccatttcaattttaatgtattcttcaaaatatactagaataatgttactacttagaaattattccattattctcctggctaaattcttctataatgtcaccaatatttataaaataatgctattcaaaagcatctctaatcttgccctaatctacattgaagcattttaaaattatttagctttcttgacttatactatactctaaagaaagtatttttataaatgtatctctcatgtcttctctttgatgctgtcattttcttataactgttttacattgctagttccaaccagtgtaaatataaacacctcctcaaatccttttctgattaaaaaaatctctaaattaatttcccctttgttttattcatactcttcttagagcatttactgagttcttacattaaaatcatttctatagtattatactgtgtgtgtgtgtgtgtgcgtgtgtgtgtgtgtggagggagaaagagaggaattttctgctatgcttctagaggacaaaacacctttttccacccagcacattgccttgcacattgctcatgtatagtaattatttgttgattaaatgaaagccattaaagtgacttgatttattgttataagatttagtgaagttatcttctttattttttttgtttgtttgagcacctgcgaatctgtaatcctaggacataacatctgaaataagctaaatgtaccagccatctagggaaaaggggaatttaagtctctgtataccccaaagaccatttgtgtacaaatgaaaggctgtaacattaggacattctgaaagaagagctaggaaaacttagcaaagaaaaagggtgtgggagggggaggggggcagaagtggtattttggtctttctagagagagattaggtcctgagagcaaaatcttgagggggtcactttagcttgcattgtttcactatctgtgaccggctcttccttgtcgtctgagattgactcagtctctagttggaaggcttggaactctgatttaatggcttcgccctacagaaatggcagtcacctgtgtgcagaataaatcgatgtgtcatgtgtggaataccaactatccgctaggcactttgccaagtagaaaaagaatggcagccgaatgttctaacgcttccaaaagaacagtttgcatctgcagttttctgctccaagtatgtcaattattcgcttcttgctaaggaaagtaaaatgttgcacagtaccgtattcttgttaatactgaacaaaaaaattatagttagcaaataatttttatgttctagggctcatagcagattttacagttattattgtattctaactctaccagtcatatatatatatatatatatagttttctgctttatcaggttttggtatcaatgtgaagctttctgctatatatagcagaaaaactaccctgagattttggaaagtacttggcaaatttttagaactgaaagtttcagattaaaatttggttatcatctgatgtgacgctgcaaatattcatttcttatttttctgtgtatttctcatgataactaccatgatgttggatttgaagtaaatgaacatttgattcactttgcttgggagatacaggaaatctgtgctccagttttctgtcaaatacacagtcatctctgtgaggatatgaattgctttatcttcatttttcttaattctctacatctaatgcagtgccagacaatagactcagtaaatatttgttgattcaatatatgaataaattattgaatcaatcaaagtaattataagccgttttaagaaagggaattgcctgaagctgttgctatattagaaaaatcgcatttgcagtagtggagggaaagaactgaagatcccgaagacccgtccttttctttagaatggcttacattttatattaataattttctagtaaccatagggtccccttttcctttattaaagcttctattctattagctggttaaccatacagtcttttgtcagacccttctctctctttctttctctctctctctctcattcttttctcatttcaaaacaaaaataaaaggtacattttcctacatttgtgtatattttgaatagcatcttcgaaagtaaaagcaaaagaagcaggattgggaagcggaagccgttagaccctgatgcagagctgatgaatgttcccgccactgtaaacaggagctccggaggatacggctgcctagcaagccatgtcgtatgctgagtagaaatagctgggccctgtccatcctctctgcttgctcttccattgtcctgcattttaaaactgaggaagaacctgaaccggttagcaggtggaggctgctggtagactacactcttggtagccggacagcaagtccattcttgaaggggttatgaatgccacatctccattttctataggaagaaagcattcttattcttttaacgaagaaaacttcacattgataccagaatctgataaagacagcacagtgaagattagaaatccatctcccgtaggaaaatcgattccaaaatatttctcataagtgggagttgaacaatgagaacacgtggacacagggaggggtacatcacacaccggggcctgtcggagggttgggggctaggggagggatagcattaggaaaaatacttaatgtagatgacgggttgatgggtgcagcaaaccaccatggcacgtgtatacctatgtaacaaacctgcacattctgcacatgtactccagaacttaaagtacaataataatttttttaaaaattgccaaagtaaaaacattatgcatttgaccacgtggaattcatttcaggaaagtcagaatgtttcaatattccgaaacttattaatataatttgccatacttttaggactaaggaggataattatatgattatatccattgaaacagaaaaggcattagacaaaattcaacactcatttttgataataaataaaaaagttatttgcaaatggcataaatataataaataaaaccaacgtaattgcagtgggcagacaagttggtatcagtgcttaagaaaactgtgtgacacaaaaactctgtacctagaaacaaaatcaacatacatgtacgttattccttcatgttcaaaacagaaataaaatcttcataagagcaatattcttaatggccccagactggaaaccataaaaatgtcattaacaatgaaatgaaataaaatagaaattgaaatatttcgcagaattgaagcaacagtttttgctactaacaaaggaatatatttcaaagagctaaagttgaacaaagaaagctagacataaagagtacatattttgtgattctatttatataaaattttcaaagtgtgtgaaagttacttatactgataaccattaaatctgtgagtatatctgagaaaagtaataactgagaagagtaacaagtgggaggcttgtgaggtgcaggcactctcaggttttaatctgggttgtgttacctaagcatgttcagatttttaaaagtcatcaagctgtatattaatatttatgcattttactatatgtatgttatactttaataacaagtataaaacgaatagtgatagcaatgaatcacaatatattaaataaaagaaagaattcatggggtcatagcaatatccaacaacaaaaaggagaagatggagaactttcatacacagaagaatgcaatataataaatgtagaagtgatgagagaataagaaaacctcagactttcaaaaaccatgtaataattgatgtaggcatatagttagtactccgtaacaggcaattattttcttaaaacacttttgttctgtttttattgtcttcatgcaatcggagaggacccaaacctgtcccctgagacctagataaacactaatattttgcctgcctggctgagtcagggtcccagcagagtcccccacggagtccagctaagacaatcagttcctgatgtctaacaatctatgaccagctgggtgccaggcaattaatggtaaagacaacatataatgttaaatttcgaatacattttagagtaagagtaagctctaaaataattataattatgtaatttaaaaatagttatttactgtattagtccgttttcactgttctataaagacactacctgagactgggtaatttataaaggaaagaggcttaattgactcacagttccatatagctggggagccctcaagaaacttataatcgtggcagaaggcaaaatggaagcaaggcacatcttacatggcagcaggagagagagagagcaagaaaggggaagtgccagacacttatcaaacagccagatattgtgagaactctctattacaagaacagcatgggagaaaccatccccatgatccagtcgctgctcaccaactatatccctgtatacatgaggagtacaattcaagatgagatttgggtgaggacacaaagccaaaccatatcattactgaccaaccaattgaccattcaacaaaccagtgcaatggtttattgagtattaaaactcaaacagcagatttattcttggtatattctcacatattttaataaacttactgtatctctctttaatacttttacactgttattttttgaaaaaaatgtatgctattcagtatggatatactatacttatttttaaaataaaattttctgcaatattctacaaagatatattttatggttaatgaatttgaaattcttaatgagatttgggtggagacataaagccaagccatatcattactgaccaatcaattgaccattcaacaaaccaatgcaatggtttattgagtattaaaactcaaacagcagatttattcttggtatattctcacatattttaataaacttactatatctctctttaatactttcacactgttatttttttgaaaaaaaatgtatgccattctgtatggatatattatacttatttttaaaataaaattttctgcaatattctataaagatatattttatggttaataaatttgaaattcttaacagcttaaaaagcatagaaatccaagatgaaattgtactgaatccagaaattgccttcaaattacatgtcacttaaacatacatctaatataggaaattatttagttacattgttttgtcttccctcattgtctgccacagaaaacactaaaagtacagtagtctcctcatatccaaggttttgctttcatcagtttcagttaccaatgcttaactgtggtccaaaaacattaaattgaaaattccagaaataatacataagttgtaaattttgcaccattctgaacagcacgatgaaatctcacgttgtcccactccatctcacctgggacgtaaattctcactttgtcaggcaaatgcacactgaaaccatttcccaaaccttagtcacttaagagccatcttggttatcagatttactgacacgagattgcagtacttgtgaccaaggaaactttatttaccttcacagtggcctcaaagtgcacaaaagtaaaacactatcttaacaggcagtgtggtcaccctagtactcataagcacatttcaaaaagtgtttattaccatcttcactattaaataattgcatacctctgtaaaggatattttaaatcgataatttcattcctattatctttagtgtttctcatgaaaccaatggatatcctatatggccagatgactttaaaatgtgtgtaattgtccacatataaaaatgtacctatatttaaaagtagcattaatgaagtgtcatcatgagtgtcgtttttctccatatggttttcctctgatccttttgtggtttccttcatttttccagcagcatatttcaatgtgacgtgagtcatcatttttttttgccatgcctgtttaactgcccttatgtagcattaacttttcataaatgcctctatggctttgtgccagcaaaaataaataaactaaaagtgctaaagcaacatagtgcagtgcaattcactcagggttgggtgtcagacaggtgaacctgtgtttattatataaggtctttaaagtatgtggaaattgcagatcagattgtagaccttccacttactcactgaggaactacatccataaaatgtgaataataaagggtgagggttaatgtacctggcagatgcttactaaatggcggctattattattttcatcattaccatccctagagtataacccaaaggaaatcgtgcataaacacattggtgacctgattcagtggaattcacactgctgactcgactcaatgcttgcttatttctaataaaacagtaatgctagttatggagcacctcttgtcatctggaaaatataccagaaaagcacagatgaaaagaggaagcatgaggccagcccacttatttttgctgccacatttagtcactaggctgaatgataggaaagcagaagctaaaacacagtaaaaacaaacaaaagacaaaacctaattgaggaattaaaggacttctactgcagagaaagagcttgggtttaaaacaaatcattagctgtttttgagtgtatttcttgattattttggacctcaacatctctgagaaagcaaagaaaatagtgtcagctggaaaataagttgggcttatttaaaagaaataaagacattcatcaagtaaagagtttccataaccacctattttaagatgctgtaaaatgtcataattcagattaaaaaaagaataatgcatcatattggaaagtttttttttccaattttgtctggtctttttgtaggggaaaagaccatatctctcctacaaaaaaaaaaaaacccggccaaggacatataaaccctgttccatattgctatagcatggtgtatgaaattcacagacttgaacaaaagaataaatattcatcacctctgccttttttttttttaggtgcctcctatactccttgataagcagttctctgaattcactccagacattacaccaatcattttggcagcccatacaaataattatgagataataaaactcttggttcagaaaggagtctcagtgcctcgaccccacgaggtccgctgtaactgtgtggaatgcgtgtccagttcagatgtggacagcctccgtcactcacgctccagactcaacatctacaaggccttggccagtccctctctcattgcactgtcaagcgaagatccttttctcacagcctttcagttaagttgggaacttcaggaactgagcaaggtggaaaatgaattcaagtcggagtatgaagagctgtcacggcagtgcaaacaatttgctaaggacctactggatcagacgagaagttccagagaactggaaatcattcttaattaccgagatgacaatagtctcatagaagaacaaagtggaaatgatcttgcaagactaaaattggccattaagtaccgtcaaaaagaggtgagtgttgccagacttgatccatcaaaatgccatagagtttaatcacagtgaagcaaactgctactcacaaaattagttttgggttttagagcattttctattcagctgtaagtggatgacatttattgtctaccggattaataattatgaatcacattgaagagtggtaataaatggtttaataattgatgtttttggcctctgtcttaaaatgtacacattgactgtggtataatggaaaaactaatgaattttagtatgtccagactgagatttctggctctgctatttataagtcttgtaactttagggggtcacagatagatttccttaagcttcagtattctcacctgctgaatggatttaatatttgaaattatatatatatatatatacgtatatatacatatatacgtatatatatacatatatacgtatatataagtgtgtgtgtgtgtgtatatatatatatatatatatatatatatatatatatacgcatatatatatataaataatcagccttctgtatctgcaggttccgcatccttggattcaaccaaatgtggatggaaaatgcagcattcataggatgtggaacattcagatatggaaggctgattttttcctatccatgggtcccgtagggccaactgctgcagggctagagcagccatggattttggtatccacatgaggtcctggaaccaatcccccacagatgcttggggacaactgtatatatagacaacattttcctcacaggtttttaggaagtgtaaaatatgtggatgtgtgaagactcttagtaaattatatggtattgttttatttatatcagtaaatacttattataaagtgttaataaaataaaagactttagtacaatagcagatgtaagtactaaaacttttctcatatcttgctcatttttttgatttgtcaggaataagaaaccaagtaagttcatcgcaagggagtaataaatttcttgtaaaatttccatatattaaaaatgctgtattaaataacagaatctcatacttcttacccttaatcagccagcataattgctttgtgtttgagtgagttctcaaaagactgtttacatctatctgaagaaaatattggttctctgttcactcttaaatgatagtaattatctattccagaacaatacttggaaatgctatgtaagatgaaaagagaaagagaaaaagtgaaagacttctgaattgtaaaatgtactcagtttcttttgaatttggccttaatgatcccatataagccctggctgctttgtctgttgctactcactaaatactcaaggttcaagatacctgaacttgctttctcaattttttcctctagttgtgtgattagttaagctaatctggttgtcatggaagcctgaaacaaggtgaaatgaacttttcccttaatactgaagtgaacagcttcttttgtgtccattccctctaactctaaaatcacatttgctattttgagtccttgtcagcagtattaactcattttcttaggtttttatgttttggactcagagatctaatattttaaagaaactagagtaattttactacacaatgataagatacattgatgaaagatgttcaaagtggtaaatgggaagataagaagtcattgcaggctttagacttgaaagatattgaaatattgatatggcctaaatcttcttaaagatccatattagcacagtagtatgctttgctttctttagtttttctttggagaagggggtttaaagaatcgacacgatgattgcaaagattttctcttatgccatagctgttcactgttaatattatcctacaaatgttgaatggagtaaagttcccaagatgtacaattcatgaaatgaaacagagaatgcagaagcagcctgctctgctcacctgttgctctttaggtctctctgcagccagtgaatgaactcagatttattttttgcctgcactcattttggtcatggcattgaagctgatttaacgtcatctttggccacaataacttttgtgaaagcctgggaacaaagtactcataaactcctttaccatatcctcataacagaatgctgtcaatgatattgcattaactgaagctgccaaattcctgtcaaagagttgttcgagatagaaattgtaatttgaatttcttgcatatttatatttatatttttacctgcaaagtaattaatacactttggtcatgcattaatttccttaataactgtttcaacatatatttcatagaacacattccaggaaatgcacggggcacttgggattcccaggtgtcaggtctctgctctcatagagcttatagcctattaggagagacaatgaaacattgaatatatattctccattttgttcctgaaccactaaaaatgttcttccttactgaacgtgttttctttgcttatgttcttctgtatatgttataaatataaaaagtggtttcaatgtcaaaacctatgaaaaagccataactctaatcccatcttcagtatctaagaagcaaagcaatggaaggcatttaataatttccaacacttctctcaagatgtttgtattcttgctaatatgaagttatggaagggtgataaagcctaataatacaagataaaacataacaaaaaacatatagcatgtaacaaaaaaataagaattggtgctattttttaaaagacacttttcttgtagatatggggtcttgctatgttgcccaggctgatctcaaactcctgggttcaagcaatcctccccaaaagatacaattttaaaagacattgtattgggatttttttcctttcaaaatgttttgagatttcaatggagaaaaaaatgaaaacgaaattcttacagagttgttctggagtatcttgcatttactatcaaagagaatatttttctctgattgaagattttcccaaagcaaaataacattggataactgatagcattatttaaaaaattcaggaataacattttactttcatatataccttttaaaatcataagttgtgttttaccgcatgtattcttaggttattcagaaattattaaattcaaatattaaaggttttctagtaagatcatgtgccttaaagaaaattctgctttagcatgtcttgcttcatatctttcttaccaaaagttttccttggtttggtctaaataagtctgagatttatctttagtccatctctcaggatttggaatgctttctcattaaccttcattcacatagctaagtcctgcacactctttaaaggtcatctcacgtcttgtctcaccgcaggagcattctatgaagcaaacccctccatagactctcttggataaatgtcctcattatacacaccctatattgcattgtgttattacttttccatctcctcctctaggcagtgtcaggaacacatccatcttactcaccagtcatactgtagcccctgacatacagaaggtgctcagtaatgaatgcacctgaatgaagtcacagatgctcttagatctggatggttccctgcatgtttctttgcctgaataaattgcactatttgggttaatctcctaataacagattccttatgaatcaacatattaaaacaattaatgttggcaggatttgattgcagacttgttctggtacttctctaatctcatccaaagagaaagctctgtgttaatttcatgccatagatatttttacattttcattttatatattctttctaagcagcagcatcatagaaagaagaattgtattacttctattaattctaggctaatgatgctgcaattgtactgatcatatattagcagaacaaacatcttctatcaattcaaatgaatgtattttagcaactgggttaagttgtttacatggtttattatattaaacctccaaatacacttctgaagtatgaactatttgttgctgttttttttttttcatgaaaaaatcggagtcacagagggttatataatgtgcagtgttactctgttaaatattggggccagattgcaaatccagatcttaactacaaaaacttggctctaaccatcacaccatattgcctccacccagacatcatcctgctgaacactgggtaaacctgagaaaactgacgctgctagcctagttttgttgagcacatgaatttatttcatgactcagctcgcccgtaatgaaagccttgcattttgacatgaagttttctttgctttcacgttgtgatgaagcacttgatttctccaaagagtgtgaagcctactttccctttctttcttactccacttttacgtttctgtgtcaaacaataatctttcaagtaccattctgcgatgggacaggtttaaggtttaaggttgctcccttgaccaagcactcccatcccgatgccaatcatctaaatgaataataacaaaggaaactggaaacaaaaagcatgtagtcatacccttaaaactgattcttgccctgtgtgtaacataaaggcgaggacgactgaggacatgtcttagacaaaaaacttgtcccttggtttctggcatgatttttgcagatgcagagtctgtggcagttaaaattacttccatgtagtcattcctcttgcctaatatttgtaagattactaaatgtgaattggaagcttaatacatttcttaactattttttacagcaaagaccttccgtagtttttgttacatgattgacaatattgtgaagtaagtaattaaaaggtagagtagcctagatgtcaaataaaaataaaaagcaaggaaatagattatttgtctaaaaacattacaattcaaactctctatagcttttcaatatatttaatttgcctttccctttcatgaaggtatttcagcagctttgcaacattagcttaaattttggaactaatttgggtttcgtcctacacattaatgggattgttaaaggagaaaaatcaacatttgaacagcccgctgctcatgacctcctaaccttctgtttatccagtcttgggggaatggagaaaatgtgaagagattcatgtcaatcagacactatccatggcatggtaaactaaattgattcaaaatgttccacaattacagctctttaaagctctcttaatctcaagattgttggttctgtttcttgatttatttcaaaccccttgatatggaagcaagaaacaagactgctgtgagcaaggagacaggggaggtggggagaatgtagggacagaggaaacacatagggtgtagccttagtacaaccaagggacacctcgggtgagagttacagtgcatagcaagagtgctaaagcagttaaataacaaatagagcagacactgtggattgtgtcttcttaaaactgcctagaaccctacttgtctgtatatcatggcctttattttataaactcttttttgataagtgtatcactccaacaggtttttaattcaaatgttatttgaaaaaggcaataaataatcatttaaatccaatcttactacaatatgaacttcatgttaaaaatcaatcaacaaacaaattaaaaacaccactcatgttcttgatttacctgatatctgcatatctgagatctatagcaagatgccattttgtgcttctgttagtagttgagggacagtaacatctctctctacatattttttattctgaaattactaaccctcaaggttgtaccctacccatctttaaaaaaaatcacacaggtaagttaatgataatgttgcatccttgctgtctcataaggaccttgggttggtgttgggaaacaatgactttctcctcttagatccagtggattttggtgtctggtcagcagccatgctagacctttgcacttgctacaaatttgacggcatagctgaccattgttaaccactgactgtcttagaatcttttgtttttctccattactcttctttaatctgggatgtctaaaatatacctttcctattttattatgcctgtaaatgacataccggagtatataatttggggaaaaatatttcatgctatgaaaatttttaaaaaataagtttgaaaatctcatgctggccagctgcagtggctcacacctgtaatcccagcactttgggaggccgaggcaggcaggtcacaaggtcaggagtttgagagcagcctgtccaacaaagcgaaaccctgtctctactaaaaatacaaaaattagctgggcatggtggtgggtgcctgtaatcccagttactcaggaggctgaggcaggagaattgcttgaacccaggaagcggaggtggcagtgagccgagatcataccactgtactccagcctgggcaacagaaagagactccatctcaaaaaaaaaaaaaaaaaaatctcatgctttggagactttttctcatggacatcaaataactcttagagaaggagagcaaagagattactgagagaaacatgagagaaaacaccatagtccttatggtgttccccgtcataactgagtcatttatgtaagtaaagttggtaatgccttttccttagtttggttttcttatttaacacactgggttatctgaatgagattcaattaccatgtccttttcccttatgcttcttctatgtttaaactgctttgaaaagattcatgtcctccaatgtcccctcaaataccactttctctgaaaaaccttcccttatattatacccaggttaaaattagttattgttttctcttttgtatggtagaaacattcctttattgcaaatgtcggtttttcttttcattatttgttttcacattttgcttctccagttgaacaccttgcctctaatattaacctcctccaaaacattactcacaacactactaaaggttttttgttttgttttattttttggaaaggcagatctaggaaaaactttcccagttatacaattgaaaatcccaagcccggggaaaccctcagtttgggtcatcataaatctgagcacaactgttaagcattgtaatgtctatcacataaagtccaactgccacaacagtcttatgtggattctgcctaaattttcagttttacctttcttaatgcccaccgtcactgcttagagtctgtatttcagccaggtgggaacattcataacattgttgcaatatttccccttctaggcctttatatcaggcatctcttgacgttggccctattcctttgttcatctattgcaatgggttttatctggatcatattagaatcacctgggaagtttgtaaacactacattgctgcatatatcccactttcaaactagttaaatcagaacatctgggatgttcaccacatctttgaaactttttaagtttcaaactctccagaaaattctaatgtgcaatcaaggctgagcactacttaaaattatcggttagggtttcacctgtgacttcaagcttctgtagatttccttgactctctcagggagagaagacaatgggtcccaaatgtatctgattatcaaactcgcctggacagcttttaaacatagcactttgcatgaagaaatttggcttcaataagtccttgcattcatgacatcccatgaaacttatttcaaatttttcccatctttctccatgcctcactatccaccctgccatttccttattctattatggcttcccagaaccagaagccatcctctctacctactgtacatcctgctcatttctcaggactctcagagcttttatttctttatttcccctatcttcaaaacagaagagtctggtaggaaatcaatatcctatttaaaatggaggagtagacctggggaatggaaagacaaccaggcaaggaattatcgatggctgttgatcagcacatagaaggaaagggatcatgcattaacattttccctgccctggaataagtagcttagggcatagagaaagaaaacctttccattcctaatacatataccatagacatatcttcttccatgtaaatttctgatcatctaagggtataagaactgtggggaaaatgttttattggtatcaagtaactcatctctctaccattgaaataaaatattatattaaaagtaaaagaacaaattggttgtggtggctccttcttgaaatcacaacactttgggaggccgaggcaaggcagatcacttgagccttggagttggagaccagcttgggcaacatagcaaaattctgtctctacaaagaaaagaaaatttagctgggcatggtggcatgtgcctgtagtcccagctacttgtgaagctgaggtgggagggtcacctgaagccaggcaggttgaggctgcagtgagccaagattgtaccagtgcattccagcctgcggaacagaatgagaccctgtcaaattaataaaataaaatagaataaataaataagtaaataaggtctatgaattggatatagtgctcttttctgcccctaaccaaggatgtagtgttggacaacttatcctttgcatttctattttctcttctctaaaatatgttgccttgtgaagatgaaatgtaataatgcaagtacagaacttagcatatttcctggcatatttgctcatgaaagagtggctatctattattatcagctattattattattattattattattactattttttgtctgttcctgggtccccaatataaaaggataagcatatgcagaaaaatacaagattccactatatactatgcagcagaaagtgtaggaagtgttagcttcatcatttaacattttaatacttgttataaacactcatctgtttcttgtgggttacattactattttgaatatcaaaaagaagttggctgggcgtgctggcttacatctgtaatcccagcactttgggaggccaaggcaggcagatcgcttgagttcaggagtttgagaccagcctgggcaacacggtgcaaccttgtctctacaaaaaaaaaaaaaaaaaattagccaggcatagtggtgtgtgtctgtactcgcagctacttgggagcctgagatgggaggatcaattgagcccaggaggttgaggctgcagtgagccatgattgcgccagtacacttcagcctgggtgacagagtgagaccctgtctcaaaaagaaaaagaaaaaagtttgtttttcttaagtctattggtataatcagtactccaaactatttatattaagatatatattgtcaccaaaaaagtataatatatacattcatcccagcccctaataactcttcccattataggctttcaaaacaacttacattgtatagtacatacttggtattaacttgcccatctgaattgcattttaaaatatattttaggcgttggttatgtatgccctttgaacctgactgctacacctcagaatcttagctatactcatagaaaggattttcatacgtgagactacactgagcgatgtgaattgtgaaatctgtagaaaaaagatataaggcagaattcctgtagctaagttttctctcctgctgttctgtagagcatgctcaatgaccgattgctgagcatctgcctctcttttctccatggttgtgcacacacttgctgttgctaggcagaggcaatatggatcacagaatccctaatgctctaccccagccccctcctagggaccaaacctttcagtgcctgccactctgtaatggcagaagcaaatgcctattcagtacttttcagactggctcaggaacctatgacaagtcattaggcatttaatttaacactaggcttttagaccctggaattcaatccccatgagtttctttacagctaattaagttacatgtaataactgtcttctaattcctaactgaaagtgtttttttcccccacagttaaatttgaaattgtgtgtgtccaaaacatcgtataaatttgtccttttaaacaacactgttcaagaagtaacaagtgtgtcttataaaacataaaacagcaaattgtagtttcaaattagatataaaaacttgtatttgatactgctttaaataaatatttttaaattttattttcaaggaagtgtactcttctaattcacctgagaaaatgtacataagcagctctttatgatgcagctttcatttggcaaaaacaagaatcaaaaacattaggctaatgataatatctttgataaactacattgtgtattggataccttcccttggccctcaaatgaattgtttttcagcataaaacgggtacttctgactctgatgattgacaagaaagtgctagcaataagatcatcaggtttccattattcagatacaatcatgtagtttgtcaatgatggagaaggctttctcttgtttctgttgtacaaatgttcacatttatacttcaaggttattttctcttaggccattatttagtgactgatattttctctgtcattcatcacaaaacaccagaattgccagcttttagagttgcggccttaacagcttattccattcaatatatttcctggaaaaatacagaaagccaatagattgtcttttggaagtttatgaaactgaaacgttatagttcgcaagaaacttttgttgattttgagatataaacttctgcttgagttctcataaattatgcatgtgagagggaatgtttttacttattcctcaccctgttagacatagtcataatttttctaaatagaggttaattattttatgtttgaatttttagaaacaaaagacacacagtaaaactctctaggattgataatgcctgtgctataatttggcagttcatgatgctgaagctgaattgtgaagctgtgtgtttacaaatggcttctaggtggcatagaacagggaaagcgatcacatagctctgtggtttttgtttcacaccctattccctttctcctttggagtgttagggaacacggagtggcatgccctctgcatgcacagaaggagcaaactaagcccatcctccatggttccttgctagctcccttcttgtctgtaaatgcttgctggaaaaaaaaattctacacaacactgatacagtgttaaatgatggacattgttgttatttttctccatgcccttatctatgaacagtgattttcccaggcagctccgggacatgtagccctgaaacctctttttacccttttcttgattctcctctttttatcttattaattgccaattaataactgtacttattcctggggcacatagtgatgttttgatacatagaatgtatagtgatcagctcaggctaattagcatatccatcatctcaaacacgtggtccttctctttgaccactggggtgaagctggaaatcttgctggcagctaagacagagagcacatgaggaggctagcagaggggattggagctcccaccacagagatcttctctctgtctctaaacgcaattccataaaaggtgaatttttggtgccaaagactaagaatggcaaaatgagaacacagcaagccctaggccaagttcaaatttctttcagaagtttcctaaaacctggaattttgctcttgcttagataataaaatgagatttccaagagccaccttattgaagcccaggaaaatatttctaactttgagattttatgggagactttcctaaaaataaaacaccttaattgagtttcagtggaaaaataggatttattcagacaaagaagttagaaaaggtatatggggaagaaatactctgtgcagattcatggaggcaaagaagagcatggaacatggaggcacattcagtgacctttctgtcctcattccaaacccgtggcctctaccctcattttatctctgctgggcaagtgtgaatggctcctctgttgggtctcagctcatattatcaccttctcagtgaagacttccagaacacttgatctcattggtatccttttctcctacctattattcccttttatatcacaattttattatctttgcaacctttataaaaatccaaaataattttatttgtgtgtttatttattgtctatcgtcctccacccgtatctaagtgtcaccttatctgatttgattattagtgcagtttcaatccctgaaacagtgcttagaatatagtaagtgcaaaataaatgatcataaatccgggtgggcagaagctgaaattaggaaaaaacacaaagactaggtcataaagacctaggatcgtcaataccaaggaacctagttgttataaaatgctgtgatatttaatcatgattaaatatgtagatcaatattatctttattattttttgaaactcctattcttcaaagaagaactcattgtctttctctttaagtctggtccttctatcatctctgttaaagtaggaggcactcccggttattcatgttagaaatctgagtcatccttgattattttatatccatcatctccaaaagcttgatgggatagattagagataaatgcaaattgagaggtgctggctaatttcccttctcttgaatcagagcctgccttggctacctgcatgacccatagaatgcaacagaagtgactttattcttaggctcgctgtgttttgggactgggtctcactctgtcatgcaagctggagcgcattggtgctgtcttggttcattacaacctctgtctcctgggctcaagtgatcttcccacctcagcctcccaggtagctggaaccacaggtacatgcaaccacacggggctaatttttgaatcttttgtaaagacaaggttttgccatgttgcccaggctggcctgaaactcctgagctcaagcaatccacccaccttggcatcccaaaatgttgggattacaggattgctttgattatttgggcattttgttttgttttgttttgtttttcatttcctatgaattttacaattgctttttctaattttgtgaaaaatgacattggtagttgaatccgtagttgcttcaggcagtaagatcatttttaattatattaattttgatctgtgagcatggcacgtttctccatttgtttatgtcatctactatttctttcatcagtgcttggtagttttccttgtaaagatctttcacctccatggttaaatatattcttaggtattttttcttgtaccttttgtaaatgaaattgccttcttgattttgttctcagctagattgttatcagcatgtagaagcgctactgatttttgtacattggctttgtatatactgaaactttgttgaattcatttattcaaatctaagagttttttgtgaagcctttatggttttctagctgtaagacatgtcgtcgttgaacagggttaattttacttcttcttttccagtttggatactttttatttttttcttttgcctaattgctcttactagtacttccagtactgtgttgaataggaggggtaaaagtggcacccttgtcttgttttagttcttaacaggaatgctgtcaacttttcccaacttattatctcattgtttcattggtttgaaataaaacaattacctctgactagatcctactctttcttcatgatgttaaaactgggtcttaataaatttcccctcatttatcaggttagactggttctctctcttctatatatagagcatgtacatttaccacattatgttataattaattgttttaggtctctccccttcatgagactctgagctccttgaatccaagaactgaaatctttatttattttgctatctttagcaactacaatggcactggtacattaggtatgagctcaatacatgtttgtggaattaatgctacattgttttttcttcaagtcaaacaacccatttgtataataccttgatggcagttcttctaagagattttatgttgaggaataacttgaccattggtgaggaaaaaataacaaagcttcacatataatttttgttgactgccttctatgcatacaatgaaggtaaatgctatatggggaaagaaaaaagaaatagtagctagctcctttggaggtggggaaagggacgtactacttcgataatatttaggcaaacatatacaaaataaaatcattttgtttgattttaactattttaatgaaaggaatatttgacataaaacttgataaaacaatttaaataatattgattgattgcatttcatttttatctcttatacagtttgacattcatctggtccaacaaatatttccaaaaatattattcacatagcactgattgtgtgattaaagttcaaatgcctaggaagctgtactagttattaaaatataatagatattgttgtattgaagcattttaatttttttaatgtattttttcatcttttatcattttggttttacttatgttttatcatttcttcattgactattgttgccaatatgtctctgtctagcactttaaactctagaggaagagttttaattttcacagcttcttgtgttaagaaaaaattattaatatctcaggaaataaaagcagcatcagtctttgatgcctctgtgtgctgactgtgtgaattgagtgttttagaatcttggccatccgttttcagaaaagacaatgaatgaatatgtaagaaagtctgtcatccaaggagattggggataaaattagtgctaataatagattatttcgaacagctaaattgtaagtgccaacattttcttgcttgtaatgtaataaattctgatgaaaatcatttggctaaaaatctaacatgttgtgtattatctcatttttatacaaaatataatatatagaattttttttcttaataactcagaacttcagaatagaccccagttattatactttgacatctggttgtaagtttaggatttttaaacactcatattaatagcatttttggcctgtatgaaaattatggcagaaatctttttatagttttgaagtcttgtccctcactatttgcctctacttgctaatgtcaaagaagctgccattttataggtacttattctgatcaattttcgactgggcaacctgaaaactactccaggctgaagtgtgggaaaatcaaagtaaaaattctctaagtaagaatgtgggaattcgtttagaaatacaatgcatatttaatgcctgaatactgtggcgtttattttaatatcttggagaccttgttttactttcttaagcttcagagagatcaaggttgcctaccaacttatatgtgagtatttaaaatgaatctgtgtgtgtgtgtgtatgtgtgtacaaagagctttgataatataaatggaaatgttcagactcttgaaaattaaagtataattaatataaacaatgaagaactacttctctggagttataggaaatttacagaaaagacagttaatttaaccaaacatttaatttttttggaaattatcaacataggaattcatgagggaagtgctgctaacatttactgaataatttaattataaacaaaacataacagcagggttttcaagctcttgaaaaagtattattatgtgatacttatcatatataaaagaaaatacgtgatatatatatatgtaagtaataaagcataataataaacaacctccccatccctgaaactacctcctgaggtaaaaatatactaatgtgttttttaaaataggcctaatctgctacatttttagagatccattgcattttcaaaatataagacctttctcactttaatgttttcgctggaaacctgaatagtcacaggggattagccagctgtctttctctgtcgtagtctttctgagtggccagcctctgactactgtgctttgttttgttctgtttttaatttttctattctggtgaaatacaaatataaaatttactatcttaaccattttgtgtgtgtagttgagtggcattaattgcattcataccgtgcaaccatcactacgatccactctagaactgcttccatcttccaaaactggaaggaaggggaaatgaggagttagtgtttaatgaatatagatattcagtctctggcatccaccattccagtttctgcctttataattttgactaattacctcataaaaatggaattatatatttgcctttgtctgattggcttatttcacttagcctaatgtcctcaaagttcatctgtgttgttacaaatgccagatttttccttcctttttaatgctaaacaatattccattgtatgtatttaccacatttgcctatccagtcatccactgaaggacacttgggttggttacttccatatttcagctatggtgatcgtactgctatagaaatgagaatacaaatattcttcaacaccctactttcaattcttttgggcatacccccagaagtggaacttctgaatcatatagtaattgtattttttttaatttttgagaaacctccacaagtgtttttcacagtggctttaccattttacattcccaccaacactgcatgagggtacccatttctccacatcctcacctacaattgttatcatctgtttttgtaaacagtggccatcctaacgagtgtgagggtgcatctcattgtagttttgatatgcatttccctcatgagcaatgatgtcgagcctctttgcaagtgcttattggctgttggtatatcttctttggaaaaacatctacacaggttctttgcccattttcttttttcacctgtgtgtttggtgttagatctaaaaattattgccaagtccaatatcgtgaagtttatgttctacttatttttctaagagttggagagttttaggtctatgtttaggtctttgattcattttgagttaatttttggtatggcaagggtccaacttcattcttatttatgtgtatattcagttttcccagcaccatttgttgaaaaaactttcttttcccctattgaatggtcttggcaccatcatcagaaacaatttgatcacatatgtgagggctcatttctaggctctcaactatttcactggtgattatgtctggttttttttgccagtgctaatgttttcattacagtaacttagcaataagttttgaaatcaggaagtatgagacctcaagctttgttcttctttatcaagattattttggctctcagggtcccttgagattccatatggattttaggatagattttctatttctacaaaaaatatcactgggctttgtatagggattgtgttgagtctgtaaattgctttgggtagtattgacctcttaatactattaagtcttccaatccatgaatgtgggacatctttcaatttatgcatgtcttctttaatttcctccaccaatgtttcatagttttcattgtataggtttttacatccatggttaaggtaattcctacatattttatactttttgatttttttataaattgaatttccttaatttccttttaaaattactctttgattatatatagaaatgtaacttatttttgtgagttgactttgtactctgctaccttgctgattttgtttattaattctaactattcttttgtggaatcttcagggttttctgcatataagactacaacatatgtaaacagataattttacttttttcttcctggtgttgacttttttttttctttttcacataattgctctgtctagaacttccaatactatgttgaatagaagcagtgacagcaggcacctcgctttgttcctaatcttagagaaaaagcttttagtctttcaccattgagtatgatgtccattgttgatttttcatatgtggatttactttgttgcaagaatttccttccatgcctaatttgctgagtgtttttatcatgaaagggtattgaattttgtcaaataattttcctgaatcaattgagaaaatagtatgattttttaaattcattcagttaatatagtatattacattgattgattttatatgttgaaaaatcagcccattccaaaaataaatgccatttgataatgatagtcttggtaggttttgtgtttccaaaaatttgctcattttatttaagttatccaatctgttggcatgtgactgttcatattcctctcctataatcctttttctttctttagaattagtagtagtgttttcatttctgattttagtaaattgagtcttctctatttattttagtcagtctcactgaaagtttgtcaattttattgatcattttgaagaaccagctttttggtctcattgattgtctctgttttctattctctattttgtttatctctgctttcatcttatttcctttcttctgttagctttgtgcttgtcttttccaatttattaagttgtaaaaataaactttcaacttgagatctttctgttctttaatgtaagtatttataggcataaatttcccccttagctctgctatccttgtgtctcataaattttggtatgttgtatttttattttcattaatatttattttctaatttttcttgtctttcttctttgatccgttggttaaaagtacgttgtttaattttcacaaatttgtgatttttccattttgcttttcatattgacttccaacttcatcctcttgtgttcagaaaagatactttgtatgatatcaatatttttaaatttattaagaattaatttgtgacctaacacgtggtctaccctgaaaatgtcccatgttcactggagaaaaatgtgtattctgttattgttgggtagagtgctctgcatatgtctgttagatctaattggcttattgtgttgcccaggtcctctatttcattacttaaaggaagattattctgtctgctcttgagagagggtattgaagtctctaaatattattgtagaattttttacttctacctggaattctgtcaaaattgatatattttcatgaactatcatcaggtgtgtcaatgtttataataattatatcttcttgtaataaaccttttattaatatataatgttcttttttcaccttttttatttaaaatctattttgtctgatattagtattgccactctttctcccttttgttactattttcatgtcattgccttttttattctttcactttcaaactatttacgtgtttgaatttaaggtgagtctcttgtagaaagcatatagttgagccatgtcttattcattccgtcaattcctgtccgttgagttggagagtttcattcatttacatttaaagttattgctaataaaggatacttacttctgtcattttgccatttgtttttgtttacttcctgcattactatcttctttcatgtatagctgttttttgtaattaccttctcattttcttttgtgtatattccatagctattttctttgtggttaccatggggattacatttaatgttctaatgttataactttctaatttaaattcataccatcttaacttcaataacacacaaaaatacagtttctttttagctccatctccatgcttttcagtggttgatatcacaaaattatctttatacattatatatgaaatataatctaatgatttttaaaatgcatttgtctcttaaattatgtagaaaacaaaatgtggaattgtaaaacaaagtaataataatactaacttttttttttggggggggacggtgtctcactctgtcgcccaggctggagtgcagtggtacgatctcggctcactgcaacctccgcctcctgggttcaagtgattctcctacctcagccttccgagtagctgggacaacaggtgcccaccaccaagcctggtgaatttttatatttttagtagagaaggggtttcaccatattggccatgctggtctccaactcctgaccttgtgatccgcctgcctcagcctcccaaagtgctggaattacaggtgtgagctgccaatactaactttttagttatctacatactcacttttgctgtgatctttattttctcatacagctttgtgctactgtctaatgtcctttcatttcaaactgcagaactcaatttagcatttcttgcagagctggtctagaatgtatttctccctcactttggaagtacagttttgccagatataggaatcttttttatccaaactgctttcttgaggtatgattgacatggacaaagctatatatacttaatgtatataactcaatgattgttggttgagttttttatttcagctccagaatttcttttttgtttcttttttaattttgtagtacattaactatatcagcttactgccttctggtatctaaagtttctgatgagaaatctgttgataatcttattcaggattccttgtatgtaatgagtgtcttctttcatactgctttcaagattctctctttgcctttgtcttttgataattgtattataatgtgtcttggtgtggatctctttgagattataatacttggagctcattgagcttcttagatgtttatagtcatgcttttcatcaaatttggggaaatgttggccattatttcctcaaatattctctctgcctctttctctcttcttctgagcctccacaatgtatatattggtccacttgatggtgtctcacaggttctttagactctgttcatcttctttcattttttccctctgttcctcaaactagacaatttcaattgtcttatcttcaagttcactaattttttcttcagtccgcccaaatctgctttcgaatcgactgttttttcacttcagctctagaatttattttttgtttctttttttaaaaaattctttattgatacttcctttctgttcatacatagtttttgtgatttctcctttagttctttaagcaccttcaagacagatgttttaaagtctttgtttaaagtctttgttatcaagtatttctcagaaacaacttctattgatttacagttaacgttttctccatctataattcattcattcaggcattcaccaattcagcctttcaagtactcattaaataacaaattatttaacaagagattattgactgcttcctatattctagagattctcaaattaacttgtttgaaaaagtgaagccacagttggaatcttgggccttgccaaaaagatgtgaaaggaccttttggaacaaatagaccaacactttttactcacaataatgttaccaactacttagattgttttacctaatatccttattatggatgtggaagattaaagcaaacaaaaaaaaccgcttatatagtgtctttctgatttcaggaaatatttgctaatccttcttccctagaacttcataattataataacaattcatcataatatgataatgtaaataatttagaattacagaatacctaactacaagctcaatatacacaattaaaatgatttaaaggcatgaaataataaaagttatagaccctttttaccatttctaattcattgctcaaagttgggaattattgttgaatgtattaggggaaatagtcccagatgttttcctgtgtacatctccaaaaccagatatctgcatccacgtgcacacaaaacatacctacacacttatgggcctacacattcactgacacacccacagttttaaattgtatatataaatgggattatgttatgtgtatggctgtgttatttattttttcctttgaaaaatatgtcttagagatttttaaaatatcaataattacatatttactttattattttgaagtgatatatggaattcataaataatgaatgaatcattatttataaaattaatccctaatttgcggacatttaagttttcccaatttttcctatcataaatgaggcttcagttaactttcttgtaaaagaatctttgcatttataagccagtttgtctgcaggatagatttttagaaaggaatagttccatcaatataggtatgttttataaaattttatagttctaattttttccgtattaaaaagataacagccaggtgtggtggctcacacctgtaatcccagtgctttgggagcccgagacaggaggatcacttgagtttaggagttcaagaccagcctgggcaacacagcaagacctcatcttctctacaaaggaatttttaaaaattagctgggcatcgtagtgtgtgcctgtagttccagctactcagaaggctgaggcagaggattgcttaagctcaagaagtcaaagctgcagtgagctgtgatagcaccactgtactccatctgggcaacagagtgactctgtcaaaaaaacaaaacaaaaaaacaataatttgcatctccaccaacagtgggtatcaatagtatcaatttttcttcacatctgtcagcatagtaccattctttttaaattttaccaatctaataaggggaacaaaatattagcttaatgaataacatatatatttttttcattagccatttggagttttgcgttttttgtatgattatatcttgtctatttttctattggattaggtgtttattctcattgttttgtagacaacccttatagagtatgaatatcaatgctttgtttacatattgtagattttttgtatgttttttgtctgggcgtacaacattttacacttttctgtgttaatcatatgcttttgttattttaaaatatctcccttttttataaagggcctccctaaggacaagattataaagatgttctcctatatttccccatgtgtgtgcatgtgtgcatttgcgtgtttatatgtttgaagagagagagaatctggccactgtgtatttttatgggactcatttggtactaactcagtgtcgtagctcccattaagtactagtcaacacttcctccccacccgctgtatgagctatcccttctgtgtacacctatattaccttgtgcttatccttgtgattccccatccaaatatttcacatatactgatttggatttttactccctcagtgtgagattctcgagtattgggattctatcttagtcatgttcatcttttttttttcatgcaataattgcaataatagtaagtgtttatttactaattaacattagagctgataaaaataaaattgaaacaatagttgttacttgatcttaattaatgtatttatcgcttatgtgtagaaataaactacatattttgaaacctaaatgctacttccctatttccttggttactttctgaaacaaatagaaacatcttgtgtatgaaaacattatagaaaacaaggtatttgatggccctgagagttaaaacttaaaaataatccaagtgtttgttcttctagtgtgatgttaaaaagactgaccattcaacaactgtttggattaagtggacctttcaaatacctcataagggatgtttaccagtacggagtcagtgagcacaagaaatttgaatgctctgattacatccaatttaacctaatcaagccttttttgccctgccaaattatgtaattaatcgagccagtggtggaagaaggttattttaaaaacttttcatatgtgattgatttgactccagtgtgtccaagcattgaacacccaggctgattgggctgatgtggctagatagtcggggaagagtaaaatataatagagagaatcccaacagcaaaactcacctgggtctaaatcacttatctgagagttactactgtgtaactttaaacaaagtatttaaccttcctcagtctctagttccttacctgtgaaatagacattttattcttaccttttacatatctccatatactccttctgaaattgttatatcaaagaagttaatccataatcttctacaatatctgaataaatgctaataatggtaattcttgaataagattttttgtgcctgaggagggatgaattaaaataggccacaggtgtggtggctcacacctgtcatctcagcattttgggaggccaaggtgggaggatcacatgagcccaggatttcaagaccagtctgagtagcatagcgaaactccatgtgtatacccataaaaatatttttaaagtaaaaaaataaataaaatcgcctataaatcaccttactcttacagtaggagattgaaatataaaatgagaaaataaaatttatttaaataaaattcactggaaaagtctgtattctaagttatttataaatgaatcagtttaaagataaagttaaacaatcttcgaacatttagtttcacttttcaaaggcaaaattacaaggtttgcaatgttcagccaaatctacctatctgattggctcctcattctaaactgctttataatgttcatggatacatagtagggccaagagcaatgggtagaaacacctttgcaatattctactaaaaatggcatagtataaaccctaagatagcctctttgaaagccctaaattttaacattagtgctgaaatatattttgaatgccacttcacaacatcccttgggaataattttattaacaatcttttgcatttcaataaatgacttactggacaagtgttttgaaattaaaaatataataaataataaaataaattgagcttactactatatttgctaacttttccaagacattattgaaggaaataaagaaactagagggtttcttttttcaatgttctttagcagtggacaactattttctaaataagcacttatgaaaaatgggaagatgcagcctgtaaatgaacaaggtccttctcctttcttttctaactattcataggctgacttttgggaagctttgtgtatagtctgtgaggttatgaagaagcagctatttgtttggaatgtgtctcctaatagttcttttcttcaaattcttccaagtactcataataaatattttgccaggcagtggcaaacatttttacaccagcctatgagtctgttgtgtaaatcactgacacaccatgtgtttagagattagactgcaccaattgttaagttgcataaatatcctgagctgtgtctctgtatattattaaataagtgtatccctaaagaattgaaaatgaagtatattcagaatgtacccaagtgaaactcctgttaacaaaataggaaataggtgttcaaatgaaaaatgaaaaataaatatactcctgagtaaaacttgtataacagtacaagtgcaaaagattagttttgccaatatttaggtgtatctgtcattatctgaggtattgagaaataaatatttatttgtaaaacacttaaatactgattattttagtataaaataaaatgactatttaaatccatcctcactagataattcagaacaccagaaacacagaaaagttcagaacgcagaaaaaatgattctaggaaaaagcaaaataatactactactactaataataacctcattgctcggtttctcatgtccaaaacaacggacagacttaggcgtcccattactaggaatggcaagtatctggcattctctttcgttctaggatctgccctagatagctataccttttcaccttatattttagtggttgctttcagaatttcaatgtatacattaattagttttctcttgctgctgtaacagatttttgcatagtggctcaaagcaacacaactttattattttatagggcaatatgtcaaaaatacgatgcaagtctcactgagctaaaattgagatcttggcgtggttgcattccttctggaagctcagaggataatcattttccttgatcttcccatcttttcctcttcctccatctttaaagccagcaatagtagcaggttgagtccttctcagcagcatcaccttagcctcctgctgcctccttcttccatcttttaagaacacttctgactacaccgagcccacttagataatccagaataatttttctgttagaaatgttttaacatttctaaaacagaataatgttttaacattaaaacatattttaatgttagctgattagcaaccttaattccatctgcaaccttcattcctgcttgccatgtaacatagcatatccacatggacatctttggagggagggcattattctgtctgccacaataccctcaatttttcacaatctacttggagtttatattgtatacctcatgcaatatgtagaagctttgccacagaaaaggcccatttaccccacattgctgttctttatgctgtagttgacatatacattccatacattataaacatcacaagacagtgtcttaatttttgctttacacattggtatgcttatttttcaaataatagaaaaaatgatcttttatatacctatttgccttttctaatgttcttcattccttactgatttgagttttttttccagtatcatttcctttaaaccagaagaatcctctttagcatgtcttgtagtacatgtctgttggcaacaaatatttttagtgttcttttatctcataatgtctttgttttaccttcatttttttctttttataagacatggtctcactctgtcacccaggctggagtgcagtggcatgatcccggctcactgcagcctcaacctcccagactcaggtgattctcccacctcagcctccaacgtagctgagactataggcatgtaccacttatctccattcttgaagaatgttttcattcagtataaaattctggattgacagttttttgtctttcgtagtcagcattttaaagatactgccccattcccttctgggctctatatttctgatgaaatgtcagcaataattttaattggtgttctcctgcatataatatgccatttttctcagactgcttttaagatttttttttcttttttgttgttttagaagtttgactataatgtgttgtggcatagttttcttcattgttattctgtttgaggttttcctgagcttcttgattccgtaaatttatgtatttcaacaatttggaggaaactttatgccattatctcctcaaatattcttttcctgactcattctctttctgttattcttctgagacttcaaatacaccttttgatattatcccatggatacttaaggttctattagcttattttaatatttccttctcttttttccttagattggataatttctcttgatttgtgtttggcttgtcttactctttcctctgtcatatctattctgctgttaagctcattcagtaatatttttatattttaggtattttattttcagttctgaactttccactttgctgttttataatttctatttctctgctgagatttcttatgttttcatttattattaccatattttttcatttgccatcttgagcttagttataataactaaagtctatgtctgctaaatccattatctgggtcatctcagggtcagtcttcattgattgtcttttctcttgagaatggatcacattttcctgcttctttctagaaggagaaattttgcattgtatcttggatgctgtaagttgttgtggagactctagattctgttataatcatttcaagttttgtctgtttgtgtgtatgtgcgtgtgtgcgttttgtagtttaaagtcagtatacttaaaatctcagttcagtacttctctaaatcccctttacctagactgtctgcagtctgccctacgtatgcatggctcaggattctgcagagaatttgggaatcttttttctgactccctcttttatggaattctctcttcattttctagcagttgtggttgccctgaatactgtcatatatttttgtaggccattattattcatattttcagagttcttgccactccacaatgtaccacagtggtagcctgccctcaggctactagctatatacaagcaaacaaataagtaaataagaaactcattggcctggtcctttcttccaagtttttactgtcttccagaatctgcctgtttttattcatttttataattaaaggttagtttttcattgtgttttcttcaaagttatagctgttcttttcgggggggttggtctatatgttagttccctagggcttccataagaaggtaccccttactgggtagcttaagcaacagaaatttattttctcacaactctagaggctagaagactgagagcaacacatagagagggttggattttcctgagacctctctccttggcttgaatataactctcttctttctgcatttacacctggtcttccctctatatttcattttaacttaattacctctttaaagactttatctctaaatactgtcacactctaaggttctggggttaggacttcaacatactaatcttgggtagaggacacaattgagaccataacagctcataaagaaatgtttcagccacaccacagctgacagagattcagacaggctactccctttcagtatacattctagacccacgttgctaataaactcatgttggtgtgtaaaatacaacctatgtccattcctcttcctactattaagtagccaatagcatttaaaatgtagacttaaaatctgtatgtttctaatgtagaaatagtcctctattctaaaactattttctgatatcgtcatctattagctgttcactctgtgaaaagcttcagtataaatctctaaatcaatataattcactgagaattatatcattaaatttttgaaaattgttcttgaaactgattttctcccttataactccctgtaaaatgttgtgaatatgaagtattgtcatggaaataagttactatcttctgggcagcctcacttctgatgtttttgttttccacctacttgtgttattacacacttactctaggtcgccagatcaaagagtgtgcgtttggttatataaacatgtattcagtctatgatattttaccaccgtccccaccagacttctctcttagtctcctatatcaaacatgataaaaaaacactttaagaactcagacgtacacaagagaagcagctatgaggaaaataaactcacaaaggacaatttaaaaataaaaatgtttttttccagcttcctagtttaaaaataccatgctcgttgagacttgtaacgattaaaaatagcccttgagtagagagagtgcgtggttttttttaagatctgtttatctgaaattttatgttaaaaatatttaagaatcaacattcatattttagcagtaatgtcttttatgtcctcagaatgacctcccctcccaccacatacacaaagtactaaccacttcctcaagatactatgtaggttcagagttcaactttattttgaaaaagaataactcagcctagaagttttcttatacaaaacttgactagatactcaaagccagtgctctcttcatgagctaccccgtattggcaaatgtatggtaaagaaacctttgctaatgaacagttggtatgaaatagaagtgcaaattcaagtgagtagttttaaaattaatgtacttataattttaggattcaaaattctcctctaacagaaggtacctcatctttaatgaatttattcgtctccttacttgtaattcccgtatattttagtacttagaatttttttgtaccttgaagggtaaggtgattgccaaagcattattccatctaagaaactatgcaggaagtcacaccaacaacacataacaaattaagatatgttttaaacaatattttctcttggcttttgatttgcagcaaggagaaaaaaaagttttcatgtttctcttagtctgtaaaaatacaaacactcaaaaacaacatattacattctaacaaagttttatcaggtcttgaggctcttaaaaaggacatgcaaaatgcctatgtgtacgccttggctcctaaaatggagtggggcactgaggcacattcccacggttcctctgagtcacttcgctgtatctgtcataggttggcagggataattcctagcaagcaattcaaacctccatatacagttacaagaggagagagatagacaatttttaatataggccaattctggataatgaccaagatcacatttcaactggtagatttcgcaagtgtcttatctgacaaaacagcctatgatgttatgatctagtgagtaataattccttatgaggtcggatgcggtgtccagaaaaagcaacatatgattaaagtttgtgaacccacttatctcactgtagttgcaagtagatacagcaatatttcaaattgttttaagctgtgtaatgtcctcaatgcaaatatgtgcattgggatgggacggcaggaagaaggaaagaactaataatatttttgcacctggtactgtaataagctcttcacatcctttatctcatttgattcttccccaaaaggcaactatttttataatctgcattttaaagacagatctttctggctctggagtctggacacttcatataatacatgctttttctgtaaaatagaaaattctcttattcatttactaccattcaacctatgcaaagatgcattactttgttgatttccttgatttcctacaggtctatatgttgacatagagatatgcatatctggcctgcaaatggcattgtgctcttggctttggcaatatcacgtggctcatactataccttccagccatatccagcctaagatacaaggaataagaaaggtggacaagtctggaaggtggtcctagacaagtgctttcagctctctttagaccatgaaactcctgcaaattattgggatcactctgaactattctaggagaggtgcaataagtatctcattgctttcatcaatttatttatgcacacacatatgcatacatgcctttattcttcattaaacaaatattgtttgtgtacctatacgtattaggaattgttaggctttggtaatgctgaggtgaataagtagagttcttgcccttgtgtaactagcagtctagtgggagagattataaaaaataatggctcaaattaaagtactagtgcagtctttgaaaagcattatgaagaaggatatatggagcaatgtaacaatgccagagggaatctgaactgactgaataggaggaaaaaagaagtaaaggagcggtgagggattacaaatagtagacaaagggagcatcatgtggggtgatactttgatggcagaaatcagtgtggctggagcacagagagcaaggctagtgggtgagctaaccctaaagagtagtaggcagaggtgagattgggcgtgtcctctttaagaattttagtttttatcctaaatgctaaaagcagcttttaaaagattttatgcagctatgtgtcatgattaaatgtgtgattttgaaaagatcagtttagatgttgtgtttagaatagagtggggcaagtaactgaaatatgtcagataagaaataggcccagcacagtggcttacgcctgtaatcccagcgctttgggaggccaaggtggatggatcacctgaggtcaggagttcgagaccagtcttgtgaacgtggtgaaaccctgtctctactgaaaatacaaaaattagccgggcatggtggcacatgactgtagtcccagccgctcaggaggctgaggcaggagaatcgtttgaacccaggaggcagaggttgcagtgagccaagatcacaccactgcactccagcctgggcgacagagtaagacaaaaaaaagagagagaaaagaaaggaaagagagagagcgaaagagaaaaaaaagaaaagaaaagaaagggagaaagggagggagggaaggaaggaaggagggaaggaaggaaggaagcaagcttgggtgcagtaataaaagcagagagagaaatggaggattcaggaaaagtcgtggagtaaaggaagggaatgcatagggataaacctaggcaattcctatataaaagttgaaatagaaacaaagaatgcacagattcctcctaaaaatatagccacttcttggtcactatgtgtatgacctcttcttcctggactcacctctcttatagcagagaacattgatttattaatccttaggatcagtaagtgattcctctacttgaccctctagaataaaaactaaactgcaaaacaaaacatccatgggttttttgagggaggtgggagtccaccttctccttttcttttccattatgtatgttcagatcactatacctgatcctatgtaaaattactcttcttcctcagttttttaagactgaaacgttcttttagtccctttataaaacaccaagtaagacatggaagacagacagtggaaacagctatctttctttgaagggactatgttggttattcagataatgagaaactgtctacaacaatcccagggactccataagattaaaagaaagaaaagaaaagttgttaaataaagagccagtactttataactgaaagtttagcttttatttcaggcaatctttagaggttgattaaaccaggattacttgtttaatgccttttattatctagataaaagaatgtaaaatggtacgtggtcatgtaagtaatacagttcctttgcaaattctgtaactactgacttggaattgtagttatataatctttaaatcattttggggttgacttaatcccaaaactcttctccctcacccaggaaggcccaatcaataccacatctataaggagctaactctgcttctgctgctagttttgtgtccctggaaattcacctggcttccatggtcgtcagattcctggttgaaaaaacaaaaggttgaaaaatgaaatgcttgatgatttttgaagtgccttatacctctaactttctaagaacaacaaatcttagttagcctgacatagagggtgcttgtgtgagcatgcatgtgttttgtctgttcaacttttttcagtcatgtgcatcttcaatgttggaagtaaacctcatgcatttctttctcttttgaggaacaaatacaaatgcacaataagcaactcatttgcagtgttaagatctcaggcacatgagatatttgctaatatgcaggttgtatctttggcccccctgacatctatttcagcctctcacccttctctagacatgctttttccaggtcattaagttttacaaagctcctttggcagaacctctctcaagccaatccattagtgaaatgctcccacataaaaactgaccaattctcccatgctcttgaggataatattagcaaggggcaaagtaatctgatttcctattcaaaaatatgctatacagaaacgttactgactgataagctgaactacttcagtcctatctacttttcaagataggaactattaacaccagtgatcgctcactgatagcgtgacaatgaaaaaatgcatgggactaggtatcattgcctaggcagggctatctgcttccaaagtccatcctaggaacagaaatcggtgactggacatcccatttctaaagtcttggagatctccgttattgaatcttcttttagcactataaaaggggctctataagtgggagagaggaatgcaaatcccctgtactatgtagcattgggtaatagtgaaaagcagtgtggggatcatcagttgactgcccacttgtcaatctttggagagaaaggcaatcaaggacataaccacaatccctatcttctggaatagacctgttgagggttcttttgaaatttctaaagatatccatcatctatgactttaacaacacttggactgccttttccaatatcgtagccactagccacatgaggcatttaagcactcaaaatatagtttgtcaaaatggaaatatgctgaaagcgtaaaatgcacacgagatttcaaaggcttggtacaaaaaagaaaggaaaagaatgcaaaatatctcattaataaatgtttatattgcttatatcctactatgaaataattttagatatgttaaatgccattattaaaattaattattaaaattaattttacctatttctactttcttttctgaaatatgtctattagaacattttaaattgcaaatatggctcacgttttattttgggggacagcactgtaccagacttatacattaaatgtctatagtttactggtcaaggcaaacaagccaagtattaaaataaaaaattatgtaaagaaatatagaaagatattcactttaaatctctttacagattactgtatttttttcttagatatctttgctatatcttacagagacttatatcttgaatggtagtgaaaataattaaagtgaacttcaaatttattcacattttggtgattcatttattctgggagcacagggaataaaactttaaatgtaacagaattcaggaatctttaaactggaatcatggatttgtttattccattattaattaataaattacttcacattgaatacagttaagatctaattgtcacaatatttgtatcatacttaacaattttcaaagtactatcattgcttataccataaacccttagaaaatgttgcagagaagttctgtttgaaataaccatttctatgatcatctatttaatatgatgttaaaataattcatggaatatattatctttaaactctgttccaaaaagttatttgtgaatttgtacaatgcaaacaaaaggaagcttcaaaatgggcagcaataatagacctctagtataaaaacacaaatattttaagcaaaaggtatgtagtactattttatctaaacacattctgcgtgaccttttagatcattgacttaagaattaatatattcacaacagtagactttgttttgtggttactttgtgaagaagattttttaatgaagtttcattttaaagtacaaaatcagcctttgcctggtataagagagaataactaattacaaattatacagcatcatataggccccagaagcttatttctcaattaccttcatataaaagcaatagtctatctttccattcaaaaaataattgctttcattcacttttttccctttcctaattgaaaatctgtaactgataaaatccatggccagatatctctagtcatacagattttataccttagagacaagacagattcaagacccataaagaagatcatcagctaacatttttttgaacagaataagggacaaataatgtgtttggaagtagaaagtatgtatttagtaatgtattttgccaggaaacagtcatgtgttactttatattaatattcctaagctgtgtctttctctttgatgtgaaaaccaataatttccataccaaacttacaaaatgcattcaaccatagctgaaaaataggaatgagataatctcatgaagtactttttctgtgtggtgtaggtaataacaccctcttaaaatctgaaaaatttaaataaacaactctttttaaaaggaaggagtagcaaccaaaaataaataaataaacaaagttttgtgcattcctctatttactttatccttcaaactctgtgtattaaaacagagccacagccaacatttattttgtttatacttcaagtcttatgcttaagccggggatcattgattaatctcttaatgtttacctaaaccaagagagtagaagtctgacaatccattaagggttagaaattagtaattaatttgcagcagaattaaagcaaacagttctttttctatatttcatgatcatgtttatttgctgagaaaataatattcttcctaatgcttcagatagactatttaagccagtactataatgtgctgtatatctttgacttctttgacaaagaatatcttattgcttatttgtctttcttttgtcatctgtcctatgtataggcacagcctctccttccatgatatgcagcaatcttaaagccataaaataacacaggcacaattttgataacagtaggtaaaatttgtttctctgctgttactattcatatgtttattcatttattctaaaaaaattttcaaaaatattccttgtaccagaaattctgaatggaattttagatgcagagataaataatatcaaattggtatgcgagtttgcagagataaatatgtaaatagctataatgttttatattatagttgatcccatgatacatgcacatataaagaaaacccatcactgtgaagggtgtttcaggaaggctttttcagaatgagagccactggacagagaataaagtagagtggtgattggactggttaaataaggaagagaaagtgttggggaaaagggactactggagttttgaatgtgtgcatgaaggaggaaaggtgagtaatgaaagaggatgtgatttatcattccctatttgtttcaaatataaaattgtgcccttcccattaaattagtcattctacaattattgttgattatcagtactgttattgttaaatattaattctgtactcttcactattacagcaaaatattttatgcttggttaatatccttccaatgtgaattacacttcctcatgatgttttggattttcttaaaatccaggtattgaacagaaatctgaatgctgacaacatttagtaccagaagttatcattacctcttagataatgagttcccattcctcaactcaaaacatattctcagtctaaataccagactatttttaaggctgatactgcagtgatatagtgaagaactgccttaaatgtgactcctcaagttcatccccagtgtttttctgcctccacactctcctagggtggaaaactttgtcttctacttagcttcagttagaggtggatatttccttctctgggaagacctataaattgtacagatatgacagaagattattgtggtaaaaataaaataaagagagtatgtaaatctcaggcaagtatgtcataaatgatcctctagtcctttctaaatgagaaacccatcttcaacctgccgagaaggtagagattagttagatgttgtttatgtatacggagaaggaaaaaggaagtatctgacactttctggaacttttactttttactttcaactagtggaatacatgacttactagaaattaagatttttaacttaaattatatatatacatatatagttatatatgtatatataaactatatatataatttaagaatatgtgtgtgtatgtgtgtgtgtatatatatacataattttagaccattgcccactgttcttaaattctaagggtagatatgaaaacattccctattgtgacttttgaattcctttgcgatcagggaactaggtgcctacagaaatgtccaagaatatatatcattgtcttcctgaaattagggaaggaaaaaatgttcacattgtcttcaactttcaacaatgttttgggtaaagtaaatttatcctgacagaaatataagtaaatattttgactacatttagcatatgtatgatgcaccaaaaattgcattgtaaagtttggaggtggttaaatagttactcacatttggcaataatatgtctagatgaaatgaagcagataggttctgcttgctatcaaatggactttccagcactagagaagagcttagcaagaaattcttgagcatttttaaatctccttatagcttttacttatttccacagaaaatctagctacaaaaagaaaagaggcactttgtttaattaggattatgtttattattgctaagattttaattctatttactatcaagtatggaggcctattttctgtttgaaccaagaaatacaatctctattttaggagagaaagagtgctggcgttgaagctggaagacatgaggactgttaacttttcctcctcccccagtcagtaaaggtcaggagactcagatcaaagaggtccaagaagatgtccaaagtgaaaaggcacagttccttcagttttgggacctacatctctggctttcactgtcttttatcatttcttaagtgaaaatgaaagagtaagatgaatcagttagctgtaattttgtacgaattctttcatctcctaatcacaccattcctagctaatataaggagttctagaagcatagtcttggttccactgcaaagaaagtagatatgaaattttgggtatcccagaattgcaagaggattaagagtcactggattactgtctataggactgcctgaatcatattgcagtagttatggtggtggtaggaaggagttggaatggatattagtactgacataggaaactgtaaaactgaactttttctatataagaggcttatttttagaatttgccttggactttgtaatcagattgtatatacgtaactaactactaaacactctgttcatgtcttgtgactgtgacatttaaagataattattgaaagccttttagagacagtccctaaattacaaacagattgtattacagaagtttataacttagtgaaatggagtttgagggtatatttacatcttggaacagagtgatactgaatattgaagtttcctactcaaaacatacaagttgctttagtctattcatatatgttctatggtatatgttcatgacagcacaagagaataaaactttgaatctacttttgcaatgtttcaaattttatatgagtagtgaataatactcgatagagactaaggattataaaaatgatagttcttatatgtgtatttttaacatcaatattttcctgcacaagtcgaatgttgatatttcttcccaatgtttagacatcattaatagaattattcaaggacacagattctttaatattggcttgtcctttttttagaaacttcattttttcattagacatgcatatgtctgtttacacaagaaaagcaaggtgaggaaaaatatcattattatattttaaatagtatcaagagaattgaagaatattgaataccagatttgccacttctgggtcttgcccttctttcatcagttcctgtagaataaaaacacgttactctgaaatgtatttccttgatgactatttaaaatattctgactttctgctccttgtaaagatgtactttccaagaaaaacttgatttcagcaaactatcgcaagaacaaacaaaccaaacaccgcatgttctcactcataggtgggaattgaacaatgagaacacatggacacaggaaggggaacatcgcacaccggggcctgttgtggggtgggggtaggggggaggggtagcattaggagatatacctgatgctaaatgatgagttaatgggtgcagcacaccaacatggcacatgtatacatatgtaacaaacctgcacattgtgcacatgtaccctaaaacttaaaagtataataataaaaaagaatagcttctaagcactgacttctaacctggactgaggcagccttcttaccctaccctcaagcaacccagtgatctcctgggaagctgcctagactatttcacattatgttaagaagaggcagaggaagctaattatatgtgtaacttctagaaataggcacaagaatataaagcgtccttgttgttgaggttactgacttcaaccagggttttctgtggaacttacatgagcagttaatgcctgactaaataaacccataagccttctgctatgttcagcggttaatccaattgagtaaatagccattgacatctcagtgccaggcactagtgctagggattaagtgatgaaaagtgacagaccttcttcaaatatctcattataattcctaattataatgctggagatataggggataggtgcaattgtaaatgtatgtttaaggtacaaaaacagtacttagaacaattaactctggaagtaatgaggggaatctgaagcggagttgaaagaccaataggaactcatcatgaaaaatcaggagatggttaattccaggcaaatgtatcagtatactatacacaaacctgtaacggtgaggaaggcccaggcatggttaaagcactttgagtggtttgtatgcctgaagtgtaaccgtgcagggctaagggaaggcagagaaagtgtcgtacaggagctatctggggctctttcctgaggactatgaaatagttcagagttttaaatgagaaagatgcaggtaaatatgcatgctggaaggcctaccatctcagcagaatggtccatgggttagaaggagaggaactcaaagactgatttgagttaggcctagagtcatgcatacgattttctttttgtaaaagaggttcatttctttttttaattaaataaaaactgcatatatttattgattacaatataatattttgaaatgtgcatacattatgcaatggctaaattgagctaattaacatatgcgttacttcatttccttatctttttttgtggtgataacacttaaaatatactctcaatgatcttcaagaatataatacattgttattagctatagtcaccacattatacaaaaaatgtcttaaacttatctaactgaaatgatgcgccctttgaccaacatcttcctcaactccacccccaccatccggcccctggtaatcatcattctactctctgcatctgtgaattcaaacttttaagattccacatatcagtgagatcatgctgtaattgcattgctatgtctggcttatttcacttaacataatgcccttccgtttcatccatgttgtctccaatgacagaaattccatcttttcataaagcttaataatattctagtgtatatctataccacagcttctttatcctttgatacattgatagacagttaggttgattccatatcttgattattgtgaatactgctgcaaaaaacacagaagtgcagatatctcttggacataatgatttcacttcttatagatatatgcctagtagtgggattgctggaccatatggtagttctatttttacttttttaagaccctccatactattttccataatgaatgtactcatttaaattcccatgcatctgatgttttattatgatgatatgccatgataattaagggggaatattgagacaaaataaggagatgaacacaagagaaagtaaagaggctgacttgataatattggcaacaaattggaggttgataatcctcaatgtgcttttcataccagcaaaataggaacagacttgttttatttatttatttatttatttatttttacttagagacagagtcttgctctgttgcccaggctggagggcagtggcacgatctcacctcactgcaacctctgcctcctgggttcaagcaatttctggctactttttgtatttttagtagagatggggtctcaccatattggccaggctggtctcaaactcctgaccttaagtgatctgcctgccttggcttcccaaagtgctgggattacaggcatgagccaccatgctcagccagacttattttatagcaactttattgaaggaaaattgacatacaattaactgcccatatttaaagtgagtactttggtaagtttttgtaaaatgtatacacctgtgaaaacataaacaaattaagatagagaacacatccatcaccatcacaggttaccttctgctcttttataattcttccttgcaccctccccattcccccgtaggcaactgttgatctgctgcctgtcactagattagtttttattttctagagtttatataaatgggattatacagtatgtgttctttttttcctttggcttctttcattctgcataatttaaaaaatattcaaccatgtgtgtatatcaatacaacagttcattccttttcattgctgactaatcttccattatatgaatataccatattttgcttatccagtcctgggttggtggacatttggcttgttccagtttgaggctattacaaaaaagctactatgatatttgtagtcaagtgtttttatgtatataaatttttattttctattttcttttttattttctattttattttggataaatgcctagagtaagaatggatgtatcattggtagatgtatatttaatttaaaaacaaaccaaaccaaactgcaaactctttttaaaaagctatttatattttgttgttcaatgtatgaaagtttaagtgtctgcaaacatgtatcaacatatgttttaattagatattttttttaattttagtcattctaataggtatgcagtgatacttcattgtgactttgatttgcatttccctaatgtgcaacagatgttgggcatcttttcatgtgtttatttgccatctatatatcttttgatgctgtctcttcaaattttagtccccattttttatttgagttttttgtttcctcattattatatttggttaattatacttggtcagggagaaggtgagttacaaaacactggttttttttggtggtaggaactctctaaatcttaaattatgctatgaatggatggagaagagttcatgttgcatctaggtagacgttgtaccacttatcaacacaataaacatagatgggtaaacagtgttatggtccaaaatgttaattaaattgtgaacttattgaattttatgtacctgtgtggctttcaagtggcaattttcctaaagaggagctatgtggataattcaaccttaggaacgtgatgaaaccaagcgcaactatactagtcaaactttttcttatattggagagtcctagcacatacaactaccacctttcagatgctttctctcagataatccttatacatgtattttctcctgcatccctggaattctttactaagggtacagtgctggactacattaaagctttatgacccttcttttttccaaccttcaattttttttcatcccattgcataaaaagccctatcttcactagatgacaactatgtactagttgcttaattcctcttttgtctaagcaatgtaatgttttattccagctaaaatatgcaagtcttcagaaagctcttaggaagatttaattgtaacagaagactgatatgggagatggttttatatatatgacctttttcagaccttcgaaaatcgcattatgtatatagctgactgcctatgtgtagggtcccctcatttcataaggttattgatatttttctcttccttgtttcttttatttattgccatttattatcaatccttgtgacaaaataagaaaattttaaaatatgatataagaggtagaggaaaactgtatagttggaagacagggatctaatgccacaattcaccactgtgatatttcttcaatttttccagaacattaatttaggctaacaatcatatttaataaaacagtgttataaacaaagttatctggtttttaaaattatttatgatcttgaaatatatttggaatatttgaaatatcaatttttatgtaaactatagagtcaaaaactatatactagacaactactagaaaatgagtaactatggatgttatggtttaaattgtatctggcaaaaagacatgctaatgtccaaaccccaagtgcctgcctcagaacgtgactttatttggaaacagatcattgcacaataaattactgaagatgaggtcattctggagtgggacagactcttactccaatatgactggttatcttataaaaagagagaagatgatgtgaaatgaggcatacagggagaatgccacgtgatggcagaggcagagattggaatgacacagctgtcaggccaaggaatgccttgaattcacagtcgcttaccagaaggttgctaaagtcaaggaaagattctacccagagtctcagagaaagcatggcgctgccaacactctggttttagaattcacattttcagaactatgagaaaaaaaaaatatgttgttttaagccacctaatttatggtactttttatggcagcccttaggaactaacacaatgagcaaataaattttaacaaaatctcaataccatatggagatatagtttatgtataaaacatttcaatatccacaataatagcagtaccttgggtcagaaaataatcagtgaagtccttattcatacgcagattctttgggttgcagtttgagtttctttgaactattgatggttataggtctgttttcagtgactaatatgctcacgtacagtagtttgttccttattttcaggtcatccttcaccctgcctcatgatttgtccttacttactgggatgtgcattttctcaggaagctagcatgaagggccacagagaccaggatgggaacaagcaacacttgcacgtgtggcaagtggaaatgctggaaatgacaatgatgacggagaggaaatgatacatgcctcatttttaggaacataacttaggctgtttaaaaaaagaatgagagagggaagctgattactcaataatccttgtaaaaaataaaagacctagatgagagagatggcagaggagctggagagatggtgcagccggggaggaacatcccagatgtttgatcagcaggaatcattgacaattagatgagccaataaagaataaaaaataaaattacgccaaagaataatttccattcaacagatactttactctttattcctgtctgctttgtgaaaatgatatcaaagactgacagaattatagggaactataactctttttgtccctttttctcttttttggctcttttatgtgttgtttttgtgcagttgccagctctgttgccatacaagttggagcaaatagcacaacctgagaggtcggtgactgtgttgcctctgctgtttccaaaacacataactttttctctgtatattatagactaatttaattccaacctcaattaacagatcattaaaaaacagagtattattattgttatcttttttaagcccagaaaatctgtcagccaagatagtcagcagagcttttgtcagggagacagaaaagagattagagagcataaaaggaagtgatcttattctcaaccttaaggctacagtttaaaaattctgcttataggacctaacacatttgaaacaaatataacccttcacatatattatttatatgtataaattagatgggtagagaaacaactccattctgtgatatcaacttttgattctggaaagaagctatgaaatgagtttcctattttctaaggtctggaacaatttaattttttctaaaactataggtcttgatattatgttaaaaggaatagagaagggaaaagcaaagtgcgcttatatcattttatttcataagaacaactaatattcattcccattctgtctcttttttcctttctgaattcttgacctactgggagatagtagagcagtgttcattcttcagtaggagtctctccaggagactttgattaaaagtgaaacacccattctgaacatgccactcctctgtgtggaaaatgtcagtggctcattagagactggagaaccagcccattcatggaaggccaggatctgagccttcctcactgctttccatccaccattttcatctattactcacctacatgattcaaaagtcaaatggtgctttcttcaatactgtataattttctgcctccacacctctattcaagttttaagaaagcatctaggtagctacctagaaataactagcatttttaatctattttccataatagtttggaacaatgtatatgtgctctgagaagggtattggtgaatagaggtagactttgtaccaactgctaccctttgtgattttcaaagaacgaacattatttattgactcgaccttcctaccacctaaattgggttttgtttgcttgctgttttgtttgctaagttcaacgttgggttcatcacccacacacatgctttatttcctttgcctttctcattttcagctttccattactgctcactcattgtctcagatcagttgccaaaccaattttaaatgtagactcaggaatggtttcagaagtttaatcagcctctgcctcaccaacactatcatcatatgaaatttagttattgtcttcccttctggttatgtgacatcaaatgtcatgcccctgtaatatgcatttagctcttccttgaatcctgatctgcaaatctgaatttaacatgtatatttaagaaaacacttaggtgattttatgactgggtacgaaatttttgaacttgacacttgttgggcaagagagtctgcagagaatagaatctgtagtttatcaattagtcttcttcattattctcaagcattttagccaatgtttctcagatttgattaaatctctattgattttttgccttttaacaaggctgaaaaacttaattgggcaactagttatcttattggtattcccttatgcttcagttattattatcttctgaatgtaatttccttgcataaatcttttaattattattattatgctgaaagtgaacacatattacatacttgtgtatatatgtctataagtgattgtatatgtatatgcacatacgtgtatatacatatatccttgtgtgtgtaaacctgtgtttatatgcaataatggtgatacctaatatttattgaacatatactatgacctaggaactcatacttttcacatattaattcatctaatttttcaataaccctatgagataagtatttctactatccccattttacaaattgggaaaaagacacaataagaatttaataatttattaatactcacacaatcaggaagcagcagatccaagattcaaatcccaatgggatttctctaaggcttatgtgctcttaatccctacaatatccaaatatataatacaaagtacggtaaatttgccatataactttggagtcatgatgaaggcatatggtggtgcatagggtaaatatctgtgagaaactaggtataggtattttcttccttttttatccaggatctttatcacctactcatgtttctcatgcccactgaatcccagtctgtttaacactggtttaagtcccctattggcatcgtgcttaatggtgaattagccagctagcatcctttgcctgcgattacactgtgttcggcttttccacttgcacaagagttcagtgatttggtggagattattgttgagatttttgtgtttattcccgtaattagatattatactaaaactacaccatagaatatctgcttgtgtgacttctatgcaattccttttaaaggaatctttactgagctaaatttgcttgttgataaccttaataagaaggttgactttaaatgaggaaagcaaaaaataggaaaatagaaaacattagaaaaactagaagactgtcccacattattcaaaggtatttctgtaaggcagtggttattaaaagttagtcctcccagcactttgtgaggctgaggcaggcggatcacgaggtcaggagatcgagaccatcctggctcacacagtgaaaccctgactctactaaaaatacaaaaaattagttgggtgtggtggcgggcacctgtagtcccagctacctcgggaggctgagacaggagaatggcaagaacccgggaggcagagcttgcaatgagctgagattgcgctgctgcactccagcctgggcaacagagtgagattcccactcaaaaaaaaaaaggttagtccttggagtaaccttgagaactgggcaaaaatgcagagtttagggcctcaccttgtacctactgaatcagatactggggtggggctcatgtgttttaacagcctccaggtgatcctgctgcttgctcaattttgagaaccaccactgtatggcttgtccctatcactcaagaactcatgcacgctcacacacatacacatatacccacacagacattcccagagtttcaaggtcagctgtatatttcttactttatagacattggaatatatatttacactgaattaaaactactctttgtatatttatcagatacaatggagctataggtaatttcgttagacatcaaatcctttaaaccagcgtttatcaagttttaacattcataggaatcatgctatgcagatttttattcagcagatttgaagtggggcctgatattctccatctctaacagccttcctgttgatttcaatgttactggactcagcccacaatttgagttgcaacaatttagactcaagcatgtcctcaacaaacattttcatacatatcccaaaatatggccacagttttcctttacatttcatctctactataactacaattggttacaaccttctagcacaagagatttctcatctgagcacacttatctctatccctgtgtttttaacatgaaattcttttaatctaacataaaacacattcacttacgaagctgtcactgtcgaaatctatctgttatttcaggcttaactaacaaattccacttcctttcttaaattttcagtttatttcatgtcggacatactcttatataccctatacctctttttaacaagttatctaatgctctgtatgaagttatccagttacataattagtcccaatgtattttgagttcccagaagacagatttatgtggttcttacagatcatggcactcccctcacttatctagccactgtctgactcacatatgatgctgaatgctattggcttaattagtgtttcacctgccctggaaaggcaggtgaaaataatgttttgattaatgaagtaggtgggtctgattaatcatgtgatatgactatgctcagaggggccagaagaattgtttaatgaagagcacgaccagaggtatcaccaggaagcagagagagacagagacatttaaaagccattagtgaccatgagggatgtaggagatgaaataaaagatttaaaaaaaaaaaaaaaaagatgtttcagctatggaaaaagttaattccctgaagttcttctgcctgtaaataatccttagaccctgctatcgacattataaaatgagtttttgaaaagtattctggacagaggaaataactcctcccccatacagattatttttgaattgctgaagaatacacagtaatacccagagcatactggtatgtatatgaatttgtggtccttttagagcaaaggaatcagattgcccttatgtaaatcactatgatacagccaatccaaagtttcaactctctttataatcacccggcagtcagctgagacttccttgtgactctctgacgcagtcaagatagataaagtagccaggacggttgttcctagaatttggattttcttcctatagagaatgactacagtctgaactttgggtacaatttttcaaactagaaaaataagttgaaaaactgaaaagatgaagacagtaaatctgattcaaagttatttttgatttatttgttttatatattttaaattattttctgcttactttgtccatgtacaattaatgttttagttcacttttctagatagttgatatggtttggctgtgtccccacccaaatctcatcttgaattgtagctcccataattcccacatgttgtgggagagacccggtgggagataattgaatcatgggggcaggtctttcccatgctgttttcatgatggtgaataagtctcatgagatctgatggttttaaaaaggggagtttccctgcacaagcgctcttcttttgtctgccatcatgtgagatgtgcctcttacctaccaccacaactgtgagacctccccagccacatgggactgtgagtccattaaacctcttctgtaaagtgcccagtttcgggtatgtctttatcagcggtataaaaactgactaatacaatgtagtgaagtttcttgtttatttggttttgttttgtttttatatactttccagatttagcctcctttttgtaattcttttctttgttgccattgtggcttggagttttcatgtttcgagtagttaattttaaatcattgatactggatctctcttattctatttgtaaaaatgagattagattcaatagttttcatagtgtcttcaatatttggaatcccatgactcagtgattctataaataataatgagatcagacttttcaaactttttaaagtttattgaaagagatgggacatctttaaaattgttttcacagcgtcttttataagtgcacagcacaaatgtgaatttgaaagttttagtgttttaatatgaattttaatgggatggcaggagttgtgctagaattggccaacaactctagagaaagaacggctgtaatgaattgtgtctaaaaacaaacctcgcttctcccagtcctggaatggtgcggaagatggtagttcctcctatgactcatggtgcagtagaaagatggagtaggaggggggctgtaggctcccagcacactgcaggcaatgtgatggtccacctggagagggcattgctggaatgtactggtggccactgtcaaagaatcaggtggcccctcactgagggtgtccttcagagggagttggagtaaagctgagcattactccaagtaatctaagtaaacagtgagggaggcaacagagagaaaaagacacagggagaggaagggagtgagggtgggaggaaggaaggaaggaaagaagggaagaaggaagagagggaggtagtcaggcagggagggaaagagaggcaagagataattgaagtgatttaatctatgttacaaattaaagactgaaaaatcccataatataaaattttaattatttcaatccttaatttgataactgatttaaccaccgaacccatttttgcatggaaaatctattaattactgggatacaatttagggaatgctggtgtagacaagtaaagagcatgtttggtcgaaaggagacatgaaattaccacgagaatatgtggatttacaatgattctcagaatactttttgggttatttcaatcctatgattggatcaaatacatagccaaataacatccacatttggggaactttgtgtattacacacactcactcctgctcttcttagtcctctccataatttttacttctgcaaaaacctccctgtgtctgtgtttaacgtaaaattacgtatactgttcatttactaagcacaggtatatactttcaataactaaagaaagaaaaagtacttttaagaaaaaaaataaataaaaaatcatggctaacctagcactttgcaatggcaacttttctatgaggattaaattccttgcttttttttaggtaattttacagagtatatatgtgtgtatccagcaacaaaaatattaattcaaacaaaccttaaattctcctaagaaagttctttgattgtcctcaggtgccccatgctgtagtgagatttgaccaggaagaacagagtttgaatccaagacctcacttagactgtagtgaacaaagtacataactttcttttactcgttctgcatgcacggaatgagttacttagtacttagtcccttacagtgttttgtcaatgtgtgactactgataagatgatggcaactgcttgttatatcttgcatttcccataggttttcttaactctcttttatcaagacttttcagctgtcctaaagtttaatactattaaaaatattttattccatggggaattaaaaaaaggaaaatagtagactatgatttctttatcaaattctgatgggaaggattatacggggaaaaaataaaactcttaaagagaacagtgcttgttaatgatctaaaccactgtttatcaatactctacagttatataagcaaaaactctattttgactttcaaatacctggctttgtctagaataaaatttagcttgactgttcatggagcttgaaatttccttaagtaagtgccgtacaagataatgaggatagtcccccctaccccagccttaaaaccatactattttatctggttttatctgtatttactgaacccattattataaacttaattcaattgtttgcatatttatttgcccactatatatattgatgagtagatatgcaagacaagatgaagagaaacagttgcatgaaaaaccattgttcatctaatccaaatggttgaacacctcaactattggattactctttgaatgtcacctcatctctttcttcatccccaaacacagcatcctttctgcatatccagagactgcttgcttgcttaccatcagaaaaaagaaaggaaaaagtcttgcttcaaggacagccatatggcttagaactaaagaagaaagatgggaaatgtggagttgggtggagagtcctgtaaaaggaacaagcactaagtttgcttatagagtaagcctattttatgatgtcaacagaacttctccaagtctcttacaaggaacttacacttctccttcaatcagaactgtccatagggcatcgtttaatcccactgtacactttctcaccaggttatgctcttgttctcccaaggtatcttgccgtggattaccctcatcttctttttctacttatacaaatatgtcccggtggaagcattcttgaactgttccatctgaaagatacaattttctcttaattcatatattgcttaactgacaatcccaatgagaaaggttgagaaaaaaaatctgagaaatactgagaaaaaaagagatattgagaaaaaaatcctggaccagatattcaaacatctcataatttgatagatatgtaaccttaacatacagtaagtagtgtccatgctacatcacaaaaatgttgtcaggatagaatgatgccatgtctgtgaaatgttttgtataaggcaattaggtatacttaggtaaggtgtttgcattgtttataccgaattaagctatgatgattaacattctggtgaatactactttctttcatctgtttttcatattgcctcaacccaattaaaagtatatttagcttgtacctcataaagaaaagttcatttgcttttcctgatgatgaaagtaataaatatctattatagaaaattgttaaaagtacacacaaatataaaaataaaaattaagtgtaatgttgtaaccaagagataacaactatatcaaaaaagagccacacttatatattcttatatatgtgtatataggtgtgtatctttataaactgctttgttcacttatcagcgtatcttttgcatattcgtattccccagttctatttttgcttcctcaagtgcagccacagtattttgacttcagttatgtctcactaagcatgtcatactgtgccttgggtagaataaatattcaatacattggctttattcacagaatgacttaaagccttttgattgtttaaatgtaaaattatgtgaaacagaatttctgtctttaaagatcacaattgtgttcttattgatgaattgaggccactccatgtaactgtgacttatttttccttttcctttcccttctgtttagtttgttgcccagcccaattgtcaacagctgctggcatctcgctggtacgatgagtttccaggctggaggagaagacactgggcagtgaagatggtgacatgtttcataataggacttctttttcctgtcttctctgtgtgctacctgatagctcccaaaagcccacttggactgttcatcaggaagccatttatcaagtttatctgccacacagcctcctatttgacttttttgttcctgctgctgcttgcctctcagcacatcgacaggtcagacttgaacaggcaaggtccaccaccaaccatcgtcgagtggatgatattaccgtgggtcctgggtaaatgtgttactatagaaaatataataaaaacatgttactgccacggaatttcgttgctcagaaaatattcattaatgtttgggacctaggaatgtttagaataggttctgactattgtagctccaagaacctcacccccaaagccaaacaactattttacaagctgcggtggacccgcttacaaaatcagcttaagaaacgtaaccttaaattttagaattacagattttaatgacttcatattccacgactgaccctctgagttttttgtttattaaaacttttcaacatatctcattgactatatgtaaataatcattctaatattcctaatagataagtcttctaaaagtacatgcagattactctgaagaattagtgattctatacataaagtaactgaaaccttttgaaaaaatcaatccattcaaatttatctttgaaatctatattaatttaaaataacaggaaattaaacaacaggatatccgccactctctttttgttcttgtcatagaaagttgtattgggtctgaagcaaatcactgtgaagtagaaaaccttaaagtagctagtgaaaatcttgttttcccgccgggtgcagtggctcatgcctgtaatcccagcactttgggaggccgaggcgggcggatcacgaggtcaggagatcgtagccatcctagctaacacggtgaaaccccgtctctactaaaaattcaaaaagaaattagccgggcgtggtggcgggcgcctgtagtcccagctactcgggaggctgaggcaggagaatgacgtgaacccgggaggcggagcttgcagtgatcccagatcacgccactgtagtccagcctgggcgacagagtgagactctgtctcaaaaaaaaagaaaggaaaaaaatgtagctagtgaaaaccttgttttcctttctccttgttattatagccatggttaaaatttgcattttaattatccttttctctatcatactatggtttgctgagaaatcacattttctcaatttagctcattattttaaacctctctgctataatatctatctcatcatttggctattagaaaatatgtgacaaatttcatgattcaaaatctcagaatatcagtttgggttaactctcaaaactgctgaagaaactaaaatgacatcaaggcagaaaaaaaaaagacagcctatttgagataaatatgtttttcagttttaaaaattataaaaaccatactttaagtattgtcaataagaaaagttaatagggacaagatttgatgttttacttatataactaaacaaaatcctcaggtgaactttaaaatagagtaggttctcattaatctaaagtgggtaaaatgtgatcttgtttaaattagaaaaaagggtcaggccgggcaggacacagtgactcatgcctgtaatcccagcactttgggaagccaaagcgggcggatcgcttgagatcaggagttggagtatcacccatctctactaaaaatgtgaaaattagctgggcatggtggccacagcctgtaatcccagctacctgggatgctgaggcaggagaatagtttgagcctgggaggcagaggttgcggtgaaccaagattacaccactgcactccagcctgggtgacaaagtgagactctgcctcaaaaaatgaaagaaaagaagaaaaattaaaaaggctcacataatctataagtgtccgaagtgtcctttggaataaaataattttcacattgcagttggtattaaaggtaaaataaccccccctgtttcatttaaattaaatatatctcattaagaatgtttttaaaggaattttcttcttagaaaatgtctttggaacaattcttacagaagagtttaggatgttacattttccataatggctaacttatattgaatgtctaaaaattctagtttcccaaacgcagaacatttcattttgaaaaatactatagatacaataaaatgtaagcagatagagtagtcctaatctttccttgataccatcaatgaaaatgtgtcaaatactttccaggcagaatgcacagtgaaggatgatagtgatacaaaagtaaggcaacaaagagcccttctgctaatgaagcttaaattttactgggataaatgggtaataaacaaatagatttgtgatataatgtcataaaatggtaaataatatttaaaaaataggaggtccaaccttctaattacttgtccagtgaaaacagtcattggctgcctgctacacaccaagcttctaacagaatatttcatggaagttggctggaagaaactagacccaaccacagctaaatgattacatgaggtatagatttatttgtgagtattataattccagcttagaaaaatatctgctataggcaacattgtctcaagatttcctgactgtagggagttaatttttctgagaattttaggatgaaaagagatttcctagaattaaaaaatgcgtgcaaatgatcatcttgctgaaataatggggcatgaggaaaaatgtttatatatcaaagagatctgtcaaaccattatattgttcaccaagtctggtgaattgtgagtgcctcatatccgagactgagttctcagtgccttgctagatccatgattataaggggtgtgtgctatgttgttgggctgttctgcaaaaggcactggacttaaatccatgcccaggttctaccactaggagactattaaattatgggtggtcacaagctctcaggattttcagtgtcttcatctacaaaatgaaagatttagagtgaatgacatctaaagtccccctgtatcctatcatcctgtctgctaagctaccattattaaggcagagaaaactgatcctttcgggggaggtatagtgttgaaggggagagccaggctaaagacatcagagtaggaatgcgttaatctttaaccagaagcgtaatatatataaaaatgcacagtctgatttgatgactatattaatgaatcctctattctcttgtcctgtcctgctgtctgataaagtaagtggccatgagtcccttagcagaacatttcatagttcattgtttgcaaggttctagatttataacatcaagactgaatgacttacggaaatgatgtggcttataagtgtgtcccctcatcatgttaattgtctcagtggtagactggaactctgtttatggttttttctcaagtcttcttgaactgacttagattttcaaaccagatcacctctgtgagctgcttgttgtataaagtaatacttttttatttgtactaaattcacttttcttccgttttcaaaagatcttcctcgcattcataatttcttgatgtatgagaaatgatcactttatacctctcatttgtttatcctagcaaaacacttttgacttatttgttttatatatttatatcataaatgtccatgtttatctaggtaggaaagttctctaactttaaagcctaacctttcaaaccaatttctttttcttcttaagaattatggttttgcttgggaatttccattattttatatatcttgcagtgtttcagcaataagaactgtattcagcctcatagaaccagttgtcttgtgtttcagtacaatggcagaataaggtttctgttatttcagtatctttcttgttgaagttcaacattgttgactatttaaatctattgtgttttacatctttagaaagcagttcataatcgctcttctatccctctgccacggtgtcagcaataagttggaactcaccgcccaacaaagctttcagaattatttttacttcagacttgcttgtatttgaaggttatcgacttttcctttctgccatcaaacagcctcaagagatcttcttgcacatatttgctgtcaggatgaactttattatataagaaagaaagccaaaaagctttacagggaccaaacttatgatgcttgtcattgtgatacagttctaactaatgcagaaaactaatcatggataattctgttagaactctcaatagatgagtaaattccagacagatggacaccaatatccttctcaggctgtcaaattacccacttaaactagagtaaaaagtaaaacagttgtttgatcaagcattcctatgggcctgataacagagctatacttttcgggtgtctggagaaaaagtttcattggaaagactgaatgatggattagaaagagctcgaggctagaagatcagagacttgggtacttttacgttctccatgactctgaggctcttaacttatttagggtttgatttttaatatactgggaatatgcaatgaatagaatatgataaatttatttttattaaaaaattacatgaaaactagagcatgttatatgtgtaatgtgcattatgagaattcatcaaaattatggcaagagttttatctcaaagagaggcatttgtttctgaagataatacgtagtaagatatgggaaaaacaaacttttgaatgctggttgtcaggccttcctgaaacccagtttgaattttccctcagaattcattctaactccgattgtaacaaacaaattttgctataaattatccctttgcacaaaaaagtatggacatctgtaaaatttccagatgtagacttatgtaattagcttagtaaaataaattataaaatggataacacttttcatgaaagaagtagaactttgggctgggtgtggtggctcacacctataatcccagcactttgggaggctgaggtgggtggatcacgaggtcaggggttcgagaccatactggccaacatagtgaaaccctgtctctactaaaaatacaaaaatcagccaggcatggtggcaggcacatgtagtcccagctactcgggaggctgagacaggagaatcgcttgaacctgggaggcagaggttgcagtgagccgagattgtgccactgcactccagtgtaggtgacagagcaagactccatctcaaaaaaaaaagaaaagaaaagaaagaaagaactttaatgaaggctatcatatgaatacagcaggaaatactttgctcctatgagaaaacaaaatggctgctgaagcgacgtgacattgtgagcatgccccagattatgccacaattaaacagtatgcaaatctatgcacactgagcatgaggagaaaggtgaactgaggaaaagatgtaacataggaggaggtctaagctctgttaaaaatagcttctattgaattcctaggcataaagtaagaattgctcataatagccagattatgcaacttgcctataacactttatttagcaaatttttaaacaagattggtttctcatttccataatttattttacatttttatgttttaaaaggtggatattaacaaatctgaacatttcaacaaggcctaccaaattgaagatgtagaatgaaaagttggtgataacattttcatctagataaatattcatagagtcaaataatactatatggatgtatatatatgtatatatatgtgtgtgtatacacacacacacacacacgtatacgtataaccagttatggtttttacacatatatgtataatcagttatgtgtatataggtacatacagacacatatatacacatacatatatatgtatgtatacatatagacacatatacacacgtgtgtatatatacgtgtgtgtgcgtatatatataattcttcctgtcttgtgaccattttttcatcttttgtctaaagtcattaagatcaaatggcttcatattttcagcctcaccgctgaatttcccatcccctcaagcagctccaaacaatattctcacaattataagaaatattcgtattactttccccagctcctcccttgtcgtggtgctcaaataatcttagcaaactagcttcagacacacacagaccctcaaacacaagctgcagactacccatttattaatttaaaatggatattttaatttttgaggaaatcagatagtacagtgcgacatatgaccctcattttactatttatcagtgggaaaaaatattttaacatcatcttcatggaattataaagactaatgcagtaatatctcaaacaatgagatattaatgaagatttcagttattgtgtgtgcccctattaatgctgaacacatgatttctttattggagggaaatgaactctttttaggccatgacagtgcaatataaatttgatacacaaaaattgaaatttacaggccttcagagaatgtttgaaaacatggtttagatggttcaagggaagaggggaaaagacaggaaaagaggagtagataccaagaaagaaagagtcaaagttaaaaaaaaaaatgagattcttgaattagtcttcattagcacagagtaacaatagtagtagtagtaatcgtagtaataatagtagaaactgaaaaaattaggcactgtgctgagtaatttaaatgcattcttttgttcgaacttcacagtaactctgttccacttaatcataataaatgatgttaatgtctcatttcacagagaggaaacaggcttagagaatttacattccttgcagggatcaagggatcaaggagctaacaagtgatactagattcaaattccagtcaatgtaagtctagatctagattctttatcctttctgagacactcacccaaaagtgtgagaggtagaatttgaaaaggcaaaaacagctcagaacgtgtgtccgtacttaagacttcttcgcttctatttgccggcttagatttttacacaggtgaaatttgaatggaccatgtttctgcttcattaaaggtgtaatgctctttaagatgcacatttgatatgatttactattgaatattatgtttaccaacataccaaactcaccactaccaccaccctcacatcaccaccagtatcatcactgccttttttctaatctaaaacatattatgtgtgactttctagcactaaaagaagcaatccattccaagaaagaaagaataagtcctttgatatgacctagagatgtttccttttttgctttccatgtattagttgctatgttctaaagttaaatttattttcttcaaggacattattattttttaaatttctgtgtgtgtgtgtgtgtgtgtgtgtgtgtgtgtgtgtgtgtgtaaggggtactcaggaaaatcgaaagaaataaatatatttctttgtgcatatttatttttaaaatgttcagaagtttgtattaagtggaaggtggtaattttcatagtgaaaatattaatattcacttattcgaaactatatattaggcaacttctgctgcttattgaaaaggtaatgaacaaggaattggagaaatatttattccttgtcttcctatctacataagcattctacttcttagttttcatggaaaattttaaattaaattagaatcctataaaaagaatgctcctacactgataaaatgtctcacttgatttttaagtaactatttttaggtgataagctatcagatgatctggaattctaaagttctacacttcactcttactctgaaactaacatggcatcctttcttggtaaacttaaaaatgtgtacttccttaattatatattcctagttttttttctcaaaatgttaaaataatggtgtcaaaacccatagtggtttaagcatttttagatgccttccaactaagaatatttaacattcactgtctctttatgtcagtgttttttgaagtatggtctgctgactaaaattatggttactgtagattcttatgacaaattcagattatggttggctgatttagaaattccaaaagtattttaaacattaaagactgagaaacaattctggaagtcaaatttcataatcatataatggttttattaaggatcttcaacatatttgaatctagacatgaaatggttttacttctttctatcactctccttggccaccttatatcaaatatcctttccttgttcccgaatgatatcactatcggttatcataaattttctgaaatttcaagttatttaaaagtaggctatgttcagtttaaaactcaaattttataagcttaaagatcttctcttcccaataaaggcctgacccatggcttgaaggatctggaattgtccatctcttacacatcctttaactccaacactggaattcaaggtgggatataggctcttcatgcttcctcactcctgttgctttagggacgatggggaatgggagaagctaaatgtcctgacttacctggcaccctggtcagagctctttcttggttggttgtcctgcctctctggctattactgagccacctgtgtgatgctgaccctcctgaggggtgcacggctgttctttgagagccctgttgtgcctccacactgcatagttctctgagtcagagattcaactcttccaggagtcttccagtccctccactcctgtaaccagcagtcaatccctaacgaggtcctggaaccctaacaaatccctcttgagtcctggcaagaaggctcaaacccagccttttcttctaatatgcacttacctcacaacagcatcacagaaccttaccacattaaaagacagaaggccagactgccatgggctaccctatggccaaacctcactgttttccattttctgtgatgagctgaacccagggggagatgagcaagccacctgcccaaacagatgccccagcaggggtgaggtagtagttcctccttgtagaaactcccagactttatgagggattttcttggagtctcccttagacttgacttagggaggcagtagtattggtgaggaaacacccttacctgtccttctggtattcccttttagcacaaaaactgcactgtcctggctgggctgccgacgcctgtaatccaagctccctccttggaaggccaaggtggggagattgcttgatgccaggagttcaagaccagcctggccaacatagagagatttcttttctaccaaaaaaaaaaaaaaaaaaaaaagatagctgggcatggtaacatgtgcctctagtccttgctcctctacccaggaggctgaggtgggagcattgcatgagctcaggagtttgaggatgcagtgagatataatgcaccactacactgcagcctgggaaacagggtgagactctgtctctaaaaaataacaacaacgacaaaaacaaaacagaaaccttgcactccctgacctcatggctctctcgctatctgtctccccaggtctacctctgttacagattacggaaggagagggctaggtggttgggaacagatagggtcctgatgcctcctagtaggccctggaaggaaaagtttggctacaattttctgtaaactcttttcagaacatggatgcttggggtccttgtcctcatctttgtttgagttttaagtatactgctgagaacaggagctgccccttaactgagtgcctcttagaggtccagaacaagtgggtttctactgaataaaagacttcctttaaatttatctttgaacagaagcagatttttgatgagagactacttttatattccctgatttgaaaatcaaaaaacaaaacaatacaaaactccagcagggaggaaatttttgtgttcttttatcttcattgatttgataccacaacataaagctcagtgttctgtgaagagacttccaaggtcaggcccccgacagctttgcggcttaaataagagacccctggaggttgccataggtgaaaaggtgacttgctttttgtttggggttgtttactattggtgtaagtacggacagtaagaaagggaatgacaggagatctatttgcagagttacacatttgtcacatgtaattggtgctgttaaatgtggcatctgagcattgcctaccccatcacatcctcacagccagcttcgcaggacataatagaacattcaaatagccctgagtgaaaactgttatgggaaaggtagaaaaaaatagtaaaaacttccagacatctacaaatatttttaaaaggaagttctctgactcatttgcactgtgatctttcctttgttggtccccacagtcttgacatcaatgcttgtaattaggcctccatcacgactctgagaaatcatgtcttctgtttataaacagcaaagagcaatttcgaaatgttcccattgcgggaacaggataaacattttgtgacagaagctgtcttaatctttgttctcttcaggctttttagttaccatggataatttactagctgaattcgttttttatttagttaatagcaccctctggtttttctaaaggcttgtttcttcaaaaattcagtaaatgttgccagaataaatgaaactggccatttcgctaccatgcttataacaaacataaatccacagtcatctgacaggtatgtggtgactagaactataaaaagtgatattcaatctggaacaataacaaaaaaaaaagataccaacacattaccacattagccaacagacattgattggcaatcttatctatagctcaagtttaaacaaaatgatgacatgagtttccagttttatcaggatctctgtttttcccacacatttgtgcctttcaaaggtcagaagtgaagtaagattttgggtggtcaagaaaatcagatttaatgtctcctccttgatctccagaggaattgtaatatatcagcattgtgagttttgcttagaggtcatctagtctaaacttacagttgaagtttcatctcctttaacccatcggacgagaacagagtctgctcagctatgaaggaagtcgaaataaaatgttgacttgtactgagctcataacttcttctttatacctccttcccaaagcctttcttcctttatgtaaatcctcacaaaatatttgaatttcgctatttcgatgactgttaataatcacatttgactttccagtttagtagcagcaggtataaagataataaagtttatctgtcagacataatgaaatataaatgctctggttagcaagtactttaaaatatattttatttcatgatacatacaaatctgaaagcaaccgaattataaattcattaagttggaatgaactttaaagattacgtagatcagtctccactcgctgctagaatttctctggcttaaagacagcctctggattggaatctctatgtcacagggtaatccattccagttttagagcaactctaattgccagaatattcttccttacatttggcaagaagctgcctttctatgcttttcttatcaaagatccaatttctgctttgtggggcagaccagagcaagtctgtgccctcttgtacagggcagtttttcatctctcatggcagcgattgtgatgactgcttttggtaaaattgtcacaatcctaataggaagaagcaatcgttggcaatttatgcagttaggataaaatcatactttgtaaaagccatgtaatccaaacctctgttttttgaagtgaacggaaacctagagaggctaagctaagattctaaagctgattgctcgttgagttgagcctggccgcttgatcacctaacgtagactagctcttatcactatgccttctggtgaaaaattaacttgaaatgcatttgctaaatcaatgattgcatgcacatatctaatatctgggaattggcagtgtcaagcaagacaaaacaaataagcaacattgtaccaagctcataacttcttctttatacctccttcccaaagtcctcattctgtcttctgaagcacataactctgtgccttgtaaactctcaggaataagaaaatgttgtccaagtgcactgcatttaggagattctgatccagtcgtgctttcttcattaactggtggcatcacattcttgtttacgctgcctctttgggccttagttttctcatgcaggctgtggttgtctattgaattctgcgtctgtagccaggttagtaggagaaagcaccataggtatggaaaaaaatgtgtgccaagcattttttcgcactggatattttaaattctaagtttcccaccagctctaaaatgcagtgcaggcatcatatcttacttagttctgatatactcctttctccaatatggaggtagtaaatattattatcattttcccaattatgtcccaattctatctgacctctcatgagagatttatttatgaaagatgactaaaacgggaaactaggatgtaaatgccgaatttagaataaagcagttgtctacagccaactttaaaaatacactataattaatttatctgaaatcagctctcatgtgagttataaatttgaatataacaaaatataaaaacaaaactttatcaataattttaaatagtcattgtttattttcactaattaatgatagaccatcatgtctactatgcttttatttcattcaacattttattatgaaaaatttcaaacatacagaaaatgtaaaaaatttatagttactcatatattacctgtaatcaatgtattaccataatatttttaattattttttctatcactgtattcattcctcaatatcaattttgtaattttggctacattcaaattaagttataacactaactttttggagttgaatgcagagatataaaatgttaaaacgcatacagtcatgtaataaccaccacaggaggcagcaaactacggccctgatatcagattgtttgccagtttttttaatagtttcattggaacacattcatgcccatttattgcaaagcctaaattatttgttctctggccctttacagaaaagtagttataaatttttataaatgcccttgatcaaattaataaatttcccttttattcacactttactgaaagtttttatcatgaatgcatgttaaattttgtcaaatgtttatactgcatctattgaaatgatcacattttttcaaaaagctgttgatgggataaattatgctgattgatttttaaatattgaaacaacctttcattacctggaaaaacattacttggccatgatttattattatttttatatattgctaacttttattcactactatttattgaggatttttgtgcatatttataagggctattggtgtgtagttttaaagagttttgtctgattgtttatcagtgtaatacttgcctcttaaatgtttcttactgttgttatctttgcaagagtgtgattagcactagtattattttttcttgaaatgtttgggtgaatgcaccatgaaatcaactggacctgaatttttttgttgttggaaggatattaactaccagttcatttcctttaataactataggactattcaggttgctttatgtcctcttgagtgagttttaaagtttatgtctcagggaaaaaagctcatttaagttgtgaaatgtatgagcatccaggtattcattctagttgcttattattcttataatatctataagatctatattgatgttccttctttaatttctgatattgattatttatatcatctttttttgttaatcattctggctagcgttttatcaattttattgaccacttaagaaaactagattttgttttcattgatttatctttcattttatgtttcagattttattgatttttgttacctttgttattttcttctttctgcttgttttggtttaaacttgctcttctttttatactgtcttaattgaaggtgaaatcactgagatgaacccctcattcttttttgataaagcattcagagctgtatatttcctctaagcactactctagatgcctcacaaagagtttttggttgtatcttcattttcaatcatttcaaaatatttttaactcttctcatgtattcctatttgagccgaaagataatagaactgtattgtttagttgaaaaatatttggggattttctaggtacatttaattattgattggttgtttatttgtgttgtagtcatagaacttacttagtatgatttcaacctaaataaatgtgctgaggtttgtttcatggtccacactatggcctatcttggtgaatgttccatgtgcacgagcaagaaatgtgtattctgctgttctcatgttgttggtagtgttgttcaggtcttctatatcattactaaatttctgtctactggttctgttggttacagagagaggaatgctgaaacctccacttataattctacttttctttgtttcttgtttcagttttaatagttatgacatcttgtattatagggttcttttgttaactgcaagcacacatagaatttttatatcttctcagcaaattcgcctttttatctttatgttatatccctctatatacctagtaacattgcttcttctgaaatacatctacttttatattaatgtagccacgggagctttcttttcattattgttttatgttatatttttatttttcctttacttctatggatgaattgtgatagagttatgcctgtacttttttcatatatgatcatctctttattttcattagtgtgtttagatcatacatttcattgagtataattatgatatgggtaaactggaaacctacccccattgctatctgttcttcgttgcgtttttccttttatgcctgttattggattaaatatttgtataaccctaattatttacatgtatagctctctactcatatattttaaaatatttaaaaggatgccatagtatttacaatataaaatattaatttattacattctaacttcaaaaatattattctgctttatgtgtagtataagaaccttatgacgggaggcttgtaattctcatcttctgtgctaatgtcattataccttttacttttacctatgttgacaattacaatatattgctacagtttttacttaggcagtcaattatatgttagaaaacttttaaataaaaataaatatatgtattttatatgtataacatatatatatatacacacacatttctggacataaatcttcatttttaaaaataaatctaactttctgtccaatattatacaccttctgccttaaaaatatccttttagtatgtcttttagtgtagatctgacaggaataaatcgtctcagattttgattgaagaaaaagtctttagtaagtatttcttagagctatttgtgttgtatatagaatcctgggttaactcttattctttttctttcagcactttaaagatgttactccaggccgggcgcggtggctcctgcctgtaatcccagcactttgggaggccgaggcgggcggatcacgaggttaggagatcgagaccatcctggccaacatgatgacaccccgtctctactaaaatacaaaaaattagccggatggggtagtgcgtgcctgtagtcccagctactagggaggctgaggcagggaaatcgctttaacccaggaggcggagattgtagtgggcggagattgcgctactgcactccagcctggcaacaaagtgagactccaactaaaaaaaaaaaaaagatgttactccattgccttgtatatattttttacacccagaagtttgctgtcagtcttacttttcttcctttgtatgcaaaatgtctctcttttttcctttttttttttttcttggctgctttcggtattttttctttatcttttgtttttgacggtttgaatatgatgcatcacggtttggtgtgtgtgggtacgtatgtgtacgtgtgttttggaaagttattcattccacctatgcagaagactagccacagacgtacacagcctttatgcctgaaagtgtacatgcctcttctcttctaagttagtgtagaggtttgaggcaataagtcaggagctgagttgggtttgggttttgttgttgccaccgtcagtttcagtgcatcatatgccacagcttagggtggaaaagaagattattctcagtgttccttctccacctacagcttttgatcttccctgtacatctatgcctcagaggcccttcctccagtggttgtcaattgctgattgttccctggtgtttgttggcctcgtgatggagggcaggaaaactctctgatgtcctcatccagggtcagacttaggcaggcctatatctgactgctagggatggaactttctccatgatcgatgccctccttttcatggcaaacatggcagcttatgtacaggaaagtttttcctgtccctgctctaatggtattgctgtaaacctgaggctcaggagtgctttctgtctcttccacaaggctaaagtgttttgctccttaggtgagaggagcctggagaggacactgtgcctctcccacagaagcagcctcttttctccccaggcttgaactataatatttctcttgagctgtggatagggtccatgaagaagagcatgcaagagggtagaaattttccttgtaactgtggctcccagggattctagtctctcctgctacctcacagtcagccgagtctcttggatggtgccagtgtctcttccttgcatactctgccgcaggtgagctaagtctcacaacatggttgctttagaggaacgtgcatatattttaaagtttagattccttgatttctcgtctctctgatgcatgcttggaaaattatgatttttatagttaatttcactttttcttgagtcagtgtagggataatacttttccaactttctacatcctaggaagatcttcaactctaaatttcatgtttcagagtattatcctaaaaaattctcactgtttgcttgtgttaatgtagttatgacatcatatttacccttttaatatttactgaatctagatattttgacatctctctcatcattaggctctaaatacgaaattataaaattttaataagataatggaaataaaataataacctacactaatattttgtaagtacttcatagaatttgaaaataaagcatttcctattaaaaattaaaaatacattttttctggatataaagtattttaatgaattatcatgaatgctataaccatcatttctcaagattgaagtccggtctctgaaggcactaactgcttaaagaaacacaacaagatactccactaattgtctgaaaccagttatgattgctagatacactgattttcatgatctttgagtaattttgacttgggagaaaaatatatgtcaagacatttgcttttaagaaaatgttattttccaagggaaatatatagttataaaggagctacagtataatttaaaaactacttatccttatgaatttatcgaatggataaaagaaagtgaggctgtcctaacaacatcttccagaattagcttagtatctgaaagtcttaaagtatggctgggactcagtgttattacctgtaaaaaatagatgttgcatttagtgtaacaatgtggtctcttgtagcttcgagatctataattgttaaattgtatattgcttttttagtgattctattgaaatcatacttacaatgaatctttctataattgcaggcttcatatggggagaaattaaacagatgtgggatggcggacttcaggactacatccatgattggtggaatctaatggactttgtaatgaactccttatatttagcaacaatctccttgaaaattgttgcatttgtaaaggtaactattatttatgttgttggtaaagcatatgttctgattattaatgatatactttcaactgatattaattttattaataaagttacctagagctttttccggatgtcgtattcatcagctcatggttttattgatagatatatagggataaaaatacataaataaatgcatagcctttaatcacaaaacaagtttttataagtagaagttatcacccaattcccttgcatctactaagtagaatgatgtctcaaaactattcacagtaactgctctagtttctaatcctttctatttctaatgaaattgtgcttcaaacactgtttaaattttggcaacccaaatctattttcttcagttataactaatagataaaatttcatagacagatcaaaatattactctttcaaagcattgaaattattatttcagtataaactaatacaatttgatataattagagcagaatataatttctttctcctcatcccattcaacatgacagtgcctgaaatctcacacactcattactcccccagattttgtacaccatcaatcttatcccaacctcataatttgcataaaacatttttgttctgtcatgacaattgggattattttgtactttgttgggtttctttcaacccagaggattatcttctctccttcactgattttccttttccccctttccttttctctttaaaaaaataaaagtttcaaaataactagttaattggtaaaaaaaaaaaaataaagaatatctaattgggtgtgacataaataatgcattcaatttaataatctgaactagaaaattctaacatgtagataaacttttattcatttagcctagttcttaaaataatgccttctgcttctgtgggcaaccttcaggtatgacagaagcaaaattgtctgaagttggatgcagccatagaaaaggatgagttcatgtcctttgtagggacatggatgaagctggaaaccatcattctgagcaaactattgcaaggacagaaaaccaaacaccgcatgttctcactcataggtgggaattgaacaatgagaacacgtggacacagggtggggaacatcacacactggggcctgtcgcggggtggggggaggggggagggatagcactaggagatatacctcatgtaaatgatgagttaacgggtgcagcacaccaacacagcacatgtatacctatgtaacaaacctgcacgttgtgcacatgtaccctagaacttaaagtataataataaaaaaaattgtctgaagttggaaaggccatagttttctgttaaaatgctaccagtgctcaccgaaatactaggggaaagcaatttctatcaattttatggaaagcaagtatatttcaaaatgaaaacataatttggtaattttattaatgcattgaggttaatgaccttgaaaagtttaagacagcagaaggtactcttttaaccaaaggagattatgcatttctgtaagaggtaggcagtctgtgattaagcgcctagctctccagtccccttcttctgtcatgattcttagatgtatacataaaattgtttagacctacttctaaaagtaatatatgtagttttttgtggttttgtgctgtcatgaaattctgggattatatcacaataccagttcttctcaaatttctaagtggataggaatcataaggagggcttgccaaaactcaggttcattttctccatcaccagatttaagttacatgtactaagacaaagtccaaatttgcatttctaacaaactcccagttgatactgatacagttgacctaaggaagacactgtgaagaacattgcattgtatagacctgttctacagctcagagaactgtgagattgggtcccaaagaaactgctgttatacatctatttagacaatatttaaactaagctatatcatgtttgtatttattacatttgtgtgatgtttatgtatagtacatgtattttttcatatataagaactctggtacgtagtgagtatgcttacatagattaatggatatttgtggatgttttgcctcaagacttttagatgtgggattttaatttagttaaaaagttgtaaattctacactggcaaaatctattttaccattaaaatctaaacattgttcttcatgtttagaattaaactcactcaccccagtgatgaaaaggagggggcagagggagaaacggtatgtggagcagtacacagtaattactgcagatgaagatgacctaaggaatgtgaagtcttcaaaaaatacatagtttgttaatatatggtcataggagttcagctacaattggaaatataaactacaacatgtcctttctgaaggatttgcatttagcacaatgtatgtttttgagttgggttcatgtattcattggcatgcactgtggagtcacatttttggtgctcctttcctccatcacttactagttgggtgaccttgagcctgtttcttcacctctatttgtctcatccataaaataagaaaaataataatttctaccttatgctgttggcatgagaagtaaatgagttgatgtatttaaagtgcctattacagaataagcacactaaattagttttttctttttttttttacttttgtctttgctttctttctcatgtactatgagtctactagacttgccttttgtaagatctttaatgtgtctcctcatttgttttattttagttttaaaagagtttgagctctaggtccacacttgccttcaccatgttcaatctgtatggtatgggacaagttattgaatgtaggtctcaattttattatctgtaagttgatgataataatcaaaagagtactcactctgggggcctgtgatgtcactctgattttctgatttgtccttccttaccttacatttgttctatcattcaatttttttcaggctaatttgtaataacttataaattattattttaagagcaggtaggtaatttgcatgaaaaaatagaggctgatgtagataaagcaaacagctattatgtgaatcaagaagctaatcaaatcaataagcatttattggagcacactaagaaacagcttttgatctggttgctgaaaatgcaaatctgcccaagaggtagctcttgccttcaagtgggtcacggtcaggtagatgaaagagaaatgcatgtaaacaaggatcttacaatgtaataaggtctataagaggggctactgtaacatgagagaaggaactgaacttttctgtaatgacatggaattatacagaggacagtacaagtggatatctatcatgatcatgaacatgcatgagcattcaagacagaaaaggcacaatatgcaaaagtcagagtgtttaacaagcagagttcactatctattttggatgatcctaaaaatgtgggcagggagaaggtgagaaggactttccacatcttgctatcgggcttttattttaccctataaattataaggatccatttaggtcatttatgcagggaatggttcaaatgatgatgattgcctgaaatagagcagtgaacataggagaagatgatagaagattggacttgaacaaatttaggtagtaacatctggaagatatgtgatttagtaattatgaaatatgaggtagattaaatcatgctaataattctccgtagtaaataatagattcacctcttttgcttcagacgggattaccggtgttatgactaggacctctgctaggattgtataggttctacctcctatctgaggattcctgaacaggaacaaagtccattcataggtccttttggttaagtcatggaactggaccaaaaaaaactgtatcatcctacaaaaaaagaaaatcttgttataattgttcttttcagaaaaagaaccttttagaaacatctgtcataggggccagccttgtttaatttctccattgtattagtcacctcggcttgtcacaatagaataccatagattgggtggcttaaacaacagaaatttatttcttgcagttacagaggctggaagcctgagatcaaggttccagcatggttggtttctggtgaggtctctctcactgacttatagaaggttggtcacattcacctggtgggggtggggcataaggggttgggagagaatgcaaactttggtgtgtctccttataaggacactaatctcatcatgaaagcccaccctcatgacctcatataaacctaattacctcccaaaaataccatctccaaataccatcacactggggggctcaatctggggagatgcaattcagttcatgacattcatacttttgaaatccatctacttgcaagaaagatctttatttaaaatgcacacaaaacagcccttctaaccaaggccatggaattgctgtgactatgacttatatcacttcctacctatgtgatttggagcaagttactgaacctgtgcctcaaatttctctgctgtaaaacaataataacaatcaaacataatagaatgtttctgaagattaaatcaataaacatttaattccatagaatagaacctaatataaaaacgcagtatttgctctcaatttttatatacaatgcaacagtattataatgtgcaaagacagagcataaaaatatgtatgacttcaagattatccattttacatgcaaagttttgtggtgttttcttgagtatcttgatttattagcatttaaagctcatgggttataaacttttaaaaaattgctcctaaccctctagaggaaagtttgtcaatcattttctcttttcactgtgtatgaagtattagttaatctggagtttgttgatgcctggggaccacagttataaaacgttacttcagtttcattagggctggtttatttctaaatattatccagccccttttctgtatgtaacacttctcatatttatcttcaacagtttggcagaaatgattagattttaattcctttttcgctgtgtaatttaaataatattttcaaaaatcaaaatttttattaataagaagatttgttttaaccatcattgtggcttttctttatagcaccattcttctaaatagttctaactgcatgtctcatagatcccatttcttattaactagaaaagggccaagtgtttttcctattttataaatgatgtaactttagtctgctccccaaagtgtgggattgtctaaggtattctttagttttatggcagaaagctataaagatttgaatcttagttgtttaatcagaattatgtacttgaagagaaaataatatgccagtataaacactggtctttttggtctttcactacttaattatctgataaatttctagaaagggaaaagatttcaccatgtaaagcacacattaaaaccaatatatgtttcttatttaatctcactgaccaatatttttatttcatattaatttaatttttactcatttctatttattacttgacattcacaagtatgcatcagagactacagaggatataaagatagcctaacatattttcctacattcaataaacttctgatccaatattatgattcagttcatctttctctcttaacactgctgctaaactcttcatgacttggctccaactcatctcatcctctcatactcatctcactgttcccaaatcctctgtgttacatctgtgtcaagatacatttataaaaatgatccatattctctaaccactttgttttttaatatgtctataattcttctccccagagtgctttttgagttcctatcatatataaagcactctactagatgtccagcacctaaaaatgccttagacaaagctccctgcataagaatctgacaagtaatccaaaagtacctctctattatataggtctgcaaaataagcaattctctttcaaaggaatctgaatagaaataaaggcttggggaaaaaccaaactagggtacatacagactgaaaacaaataattgagagaaggaggaatacaggaattaatgatcctagaaaacctatgtgtgtttaaagtagttcttgatttcttcctaaaggattactttacaacacggagctgtcagctctgatcagcaggatcctaatgtccatgcatctgcagtcggggtaaaggattagcatggcttgattaatgtatgacttcaccatgttgtaaacccgtatggcatcttccttgatcagtaccatgaaccccgaagacagtgcctgacacagagcaggcacactcatgtatacttgatgaatgaataacaaaataattggaatttaaattcattctagagaaatggtacaatgttcatggaaaagcattttggtaagaatgtgtgactaatttgaggaattaccagtagtgaaagtttgagccaaaacattaggtgtctaattagagccaaatggcagttaaatctttaaaaggagtcagaacatagaggctttatgtagcaagttgaaaaatcagaaggtcatctcaaggacaatgttgtgattgaagaacattaaataatatgtgacatgggctggttgggttctttaaaagattctggaggagggctgggtgccgtggctaatgcctgtaatcccagcactttgtgaggcccaggcgggcagaccacctgagatcaggagttcaagaccagcctggccaattgtggtgaaagcccgtctctactaaaaatgtaaaaattagctgggcatggtggtgggtgcctgtaatcccagctactcaggaggctgaggtaggagaagtgcttgaacccaagagatggaggttgcagtgagccgagattgcggcactgtactccagcctgggcgacagagcaagactacgtctcaaaaaacaagattcctgaggagatacatagatgatggaggacataagacttaaggcagggagagcagtgaggaaggtgctgcagttatatctgagaaataagaggtactattttaaaacagtgagggtagtgatgaagagaaggaagcaacctacataagatttgggtttagatgctgggattttagacaaaaagattctaggaggaacctcaaattctgacttggtgacctgttgccattcataagatcagaaggggtaaatggagaaagagtttcaggatgcaaaggtggtgagttacactttcgatctgtgagtttgagatgcctgtgagacatcccagtggaaaagtcaaccagacagtacaatgcagaatagggctgttaggtgagaagtctcagctggagatgtatagttgagaatagtcattgagagttgaaatcctggaaaacacccagggagaattggtagaatgagaagagaggaagcttgaaaaatgaactcaacttttaaggggcaggtgagattgaggaacttcccaaggagactgagaagaggccactcaaagacaaacatgcgaagatgaaaagggaaggtaggttttgtaaattgctcctaaatagcagaggcaaagaaattttttaaaattcaaattaatattttaattcctaagaataggtgtggaaaattcatcgactgattgaagaattaaaattattcgctacaaattcaaagaatattacaatttgtaattataaaaatcactttgttaaatgatgactatagttaaaaacttaagaaaatatctatgtgaaggatgggataaaaattcagcaaaatttaagaagaataaaatcaagagataattacttcatatttatatctcttaatccgtgacaggaaatgaggttttttggatcagagaacagacaaattatttacttacatagcaaacttagcactggttccccatgccccagtccccagtgggggacctaatagccagatgtaccctgtgtatacaggggtttgtaccacaggagaggagcttggaaaatatgtgtctcagaactcataccgtgcagctgagccagctgcctgtctttcccctggagaagaaaagagaaagacttcaactttctaaagtaaataaattgtctctggggagacaaaggtccctaggtttattattctgagagtgtaagcacaatagcttctgggaagaagatcctaagtttctcaggaggtctccatctttaacttccaatggttgtttcccattcaaacatcctttaacccagatgccagcaatgttttgcctaaagccttgaccttgcataaagtgaatatattcatgcagcattttttcctggccatgactagaagtgctagactctgaaatcagcttaaataatcacactggggcagaatctgtaaaaatggaaaaccttcctcttatgtatttttttttttttttttttttttgtctcagctgagataatttaccaagaagggctcttttcagagtaggtccataatagaacttgacctagtcataatgtgatgatggatccacatccagctgacctggatgttaaacctaaagcaatgcatagcatctttcctagatttgaaggatttttaaagctttgacaatacatcatctctcaccattcctagcctcagaagccccagacagaattaatcacttcctcttccctattcccaccccactttgtgttaatctcttagagcatttttattgtaattagttgtgcctgtctgcctcaccgggctatgaatacttgacaggagaaaatatttcttgagcacccacgatattcagggcattttgctaaatgttctaagaagttcaagaaaatgattgcattattaagaatacttcttgtttcattttttgtgtattttaaaatatagtcctgagctatattaggttaaatgaagaggaatttaattagctaccaacatagggggatatttctcaagtataaatatttatgagctaattgtatcgctgatagaattagctatcaattatagggggacagctatcaatagttacggacttaaatatgtgtgtcttttaagagagaagtgaggaaaggaaggacaatgtgatcttggtctttgaaggaaaaggtggcatcatacatagcgagactaagagcagagaattaggtaatgtttagtatccaagtttcactctgacacttgtcataatgaaagagaaaaacatcttaacttttttttttatatcttcagtaattagctattttatgcggaagctatgtgtgggaatgttcaagaacatttatcaagatttaaagatagaaaataattttcttctagttcaaacttgattgttttacactgccagtcaagcaagagtctgagtgttgaataagatcaggagcctataatacattgtctccccagagagattaaaaaatactatctattagtttcaaggagaattaattgattcacatttgtaaagctcttggatgtaaaatgtgctataaaaagaataaaaaacattatgtgggactcagacagagtagcactaactttcttttcattggaaaaacatcttggttgtctagatatatttttcagtgatgtgtatgaagcaaataattcaatttattattcagttctaatacagatttaattacagattttcatactgcaatatctaaaagagcatatttgaccctttttttttcttttgagatggagtttcactcttattgcccaggatggagtgcaatggcgtgatctcagctcaccacaacctcagtctcccaagttcaagtgattctcctgcctcagcctccctaatagctgggattacaggtgcccgccaccacacctggctattttttgtatttttagtagagacggggtttctccatgttggtcaggctggtcgcgaactcccaacctcaggtaattcgccagcttcggcctcccaaagtgctgggattacaggcatcagccaccgcgccaggccttgacccttttttaaaagggatacaaatttacctcgatagtacacagttaaattttattttgctttttatatgttttaatagcaggataattcaaatctgacattttaattaacctgcttactttttaaataattgctggtcaaagtttacagtagcaatttttttctcaaatcatgtattttacctacttaaggagcattcagataaatgttatatttcctgcatattaaatgtaaaaagttagcaattcagcaactgccgggacgatttgtaagttaggttgtatttacatttaggacatagcagagaggaagcactgatggtttttgcccatattggtcatttctgtttccatagcaacagaccactacttctactcatttatatgtaatttgtatcctacatgtgttcctctagaattggcaagtgtgttcaaaaatcgaaaacaaagtcatcaattattttgttcaaaatttaatagttttccttctgggtctgaccttgatctatttatatgcgtgtgtttgttttactttccctttgtttctctgttttttccagtacagtgcccttaatccacgagaatcatgggacatgtggcatcccactctggtggcagaggctttatttgctattgcaaacatcttcagttctctgcgtctgatctcactgtttactgcaaattctcacctgggacctctgcaaatatctctgggaagaatgctcctggacattttgaagtttctattcatatactgccttgtgttgctagcatttgcaaatggcctaaatcaattgtacttctattatgaagaaacgaaagggttaacctgcaaaggcataagatgtgaaaagcagaataatgcattttcaacgtaagtctaatagacatttctactggtaatgttgtacagcatttagagtgcaccacatcacaaacttgaaaaacctatgacaaatggttgtaaagaaaatggggaactaaaattgtgcttaatgcagaaaacagaattaacatggctttgaatagaaatgaaaacttccgacaggaaaaagaatacctgacacatttattttaaattttagtaaaatcatcttttcttctaaatgacttcatgaaaaagaaagcaatagatactatttttttgatgtagaatttaaaaaggtagcctatatactacaaaagcttacaagtacattaaaagatagaacatgtgtaaaaccactcatgttggaaaattcaagtagatttcaatatttcctcatgtgttttccaggtactaaagtccgtttatgtatctctttcattctctagtttcctacacaaaaacttaaccatctaaaaatagtgcaaatggaaatctaagactaatctagccattactgtcatgcacacaaaactctctgtgcccttatggctggatgagcaatagacagtgtctattgtcagctctctcagttattctcataatgggctttgctaacagcacacagcttcatgggcactgtgtctgatggtcacacagctctcataggctattcctctatatatctgtcccatttccttcccactgtgacaaacagacggttaaccagtagctgaattaataagtgaagtgattttcctccatacagtaaccacgtttgaagacacagtcattttgtaggtgactttaaaagtcataccttattcatgagccatcatagaatcttgtatactataagagaggatggtaatttctcaagtaacaaaaaagtcaataatatcacatgaacaaaatcacttacagctaaaatgctcttgttggtctaattctacatctgttttatcttagctccaatatttaaaacttcattttagttattcatcatctttttatttgcacataatttttaaatgtcagccattgatacctcatttttttcagaaatagatttgatacatccatggatcttaaagaaaacataattttttttttttaaggcagagttttgctcagtcgcccaggctggagtgcagtggtgtgatcttggctcactgcaacctctgcctccagggttcaagtgattctcctgcttcagcctcccgagtagctggggctacaggcacccaccaccacgcccggctaatttttgtatttttagtagagatagggtttcaacatgttggccaggctgagtcttgaactcctaacctcaagggatctacccaccacagcctcccaaagtgttgggattacaggcatgagccacttcgccggccttccagctccttcttgatcctgtattcctaagcagcagtttcttggcctgaccggttcactcagtcttgacatcttcccactgctctcttctgaccctgggcaggaggaattcaatgaaatcccttgcaaaaacatcctcataactagcatggcctaggatggcatctcaattttgatatctgaacttctcttcctcccccgcccaccccctaccctctggctcccgtcttatttgtggttcttgacttgcaacttggccagggaaacggattagagatttacaatggtcagaccccaccaacctcttccttcataaatgagagttctgctctaacaatctttgtctgtctgccagctggtctcctggatttctgatggagaacccttgtgaatgctctttcacaactttcttcttactttatgctgcataacctggtgcaaactgcttgccaagaccaccccatctgttcctgttgccatatccttctgacttcctcctttgccttccagaaagaacttccacgtagcatttaaaactgtgttaactcccaggtcctctttatttcagggaaaagctctggttcccagacccaacccttctcacctatctgattcctctgcaatcaataggttatacataacactgtcatgatttatgatcccctaaaattcctaggaatttctttgtccctatattggtttctttgtaagtaataacatattacaaactaattataacataaatcaaaggagattaaggccagacaagcatgatgtaaaatgcttaatataaattttattccaaaatcaaatatactggattattgggattatgtattactttcgtttgtctctaccagtgatttcctctattgtcatgaaaagcaacatataattacatatcttaaatactataggcctatatcattcaacccaaataaatcagttattgcacttgaattattttttctaaataatataaatgtgcaagccacaaattattttttgcttcaagatattgaaaaactaaagtatatatcaatagcccttaacattaggaagcaggaggtcctaggcttaagtcacctgtctcttgatgactctgtttaagcaaaacggacaccagtcattgtcacagggtatatagtgatacccttggggcccctgctctacatcttacttctgtgctttctttggtttttaattttctttttgtaattctgtacatttcataaattcaggctcttttttactgcccactatttccgagaccttattctatgtgaaggttaaaaatacactaattcatataaagtacctaacacagttcatgtcatagaatgtcatcaaaaatggtagctactcttattatcttcatgattggcaatggtagaggattatctctcacatatctctcataaggtttcatctctattattccttccactcagtttcaaactttgttaaaattttgaacccaatatttcccattagctaccactcctgtttcattcctttcatccaagtaaacctaaaagaagcctatacaagatatcttattttctcacctctcactcaaacttcatccaattataatttggcttctgcttccatcattccactaaaactgctctaaaaattatcacctggagccttcttatcaccattaactatggatatttatctgctcacattttacttaatgtgtctgcttcatttgaccctgtttaacacttccatttctggaaatcttgccccttttaacttctatattattacctttttcacttcaaatcttacttctctagcctttctcactttactctaaccctaaccttaagtatactctgataattttttattttcattactgcttttaaatagtggtatgtcttagcatgctaacctgagacccttttaacagtacccctatgaaaactcatctgtgcttttggaattggctctatatgtctaagtcatgacttccatatttatattactagcaccaatttctatcctcgggttgcacaatatattcagctgtctagtggacacctctctctacatgcctcctgaagacttaaattcaatcaaagggaatttatcagagtctctctaaaacatattcttcctcctgcttaattccttttcttagtcaacatcaccacaatccacccagaaacttacatcaaaaacatttatcttattctagatcctaccttcttctcatcccttccatgtgtagtcggtcaataaatatctgttcctgctcctattatcttggcactgtcttccccttgctctccactgatgcccaaatctaagtacccctgcccctggtctctgccttgtttcttatgtcttccattttgcttcctgaattatatttctaaactaatatctgaggctaccctgtttaaagtgccaaaatggtttcccatttcttacaggatactgccacattctttagcttgacattttagatcattcattgatctgcttgtcccctgcctcctgtcttagtccatttttgttgcaatgaagaaatatctgagactaggtaatttataaagaaaagaggtttatttggtttatggttctgcacactctataagaagcacagcatcaacatctgcttctggtgagggcctcaggaagcttccattcatggcaaaagagtgaagggaagcaggcatcacagggggaaagaggaaggaagcgagggagggaggtgcaggggtcctttcaacaatcagctcttgtgagaactgatagtgtgagaactcactaattactcctaggatgacactaagccttttgtgagcaacccacaatccaccctcatcactcaaacacatccctctaagccccactttcaacatcagggattacatttcaacatgctatttgaaagagacgaacatcctctgtatcacttccttttcttgtctcatctttcaatcccccattaacactttactcttcaatatttcctgatggattataaatacaaatccccaaatacgttattttcttctcttattcgagaatggccttattctgcccttccatgtggcaatttttttttccaaatcctacctcagatataccttttgcaggaggccttttctggtcttctccctgactgaatgcccagtgtcaggctgtgatccatgtcttctatgcatcttcatgccgtttcccaccagtgaatacatacttcctcctgctcctttccaggttattttctcattaccctgagaagaactacatgttaccaaaaaacacaaaatatttagttgttgaaactattctatgtgcaattttaagctattagcccctggtaaggtactttcttatgaagagaggggcacaggctttgtgacaggtattgtctcattaagcaaagcccttttatatttgttggagctgtattcctaatggttgtaactggccagttggagtcatacattattttaatatttcatttttgcttataaactaaagataaaatattcagatgaattttttattaatttatgtttgctcattgttttagtcccatgggatagaggaaaatttcaacaatggaatacattacttttttacacgttcaattcttctggctgtaaatatataatcagggaaacaagctaattgtataaagcatatgttgagcaatatattcaaagcaagagataaaatgctatcattaggaaggcaggacctaagtccacccatacagactgttaggatttagtcttcaacccaagttttatactaaatgtcacttaattaaattgtagcattatcttggagagttttcagttcatatcttaccacagaacaagaaaaatattagtcacgtaaaggcattctgagatgtgatactttaagtaatgatccttcaatgtatgggcaatgttggtctcaatagatttgggaattactaatgacaaaaacatttctgaaagcagtggctttgaaatgttaacttagactgattttttaaaaatccacctgttatctgaacaattcattgagaaacactaaggccagggtcttaattcctctgagaaataaatatattttagttaagtggaactagtctttaaatctcaccactgacttattccactaaaagaaggaaaataaaagaaagaaataatctataagtaatcatgaaatgtcactttatttagaattttcccctttaaatttttttaaacatcaataaatattttgcaaaagtatttattaatgtttcctaaaattagtagttactatgtagacaggagcaaatgtgtactattcaaaataataagtggtttattctgcatcattgtttttatttgaaaaagaacctgtaatggggtttatgtggtaacattttacactatatattgtataacttataatatttaacttacaactttccttaaattgctattcatgtcaggaaaaccagctgatttttatgtgtatactcacagtgagaacataaactatttggaaagaaagaatacaattctttcacattaaatccaaaggacactatgattaattttagaagttgtctttaaagttactaaaaataaagaattcatggccatgggccaaatttactttttcctgagaaattttcaaagagtagctttagtggcctttgtctagggccaatgagtcagattgaattctctctattattgttggaatctggcacctgggttttcctctaagaatatgtgatcacctcctcgtagaatgcacagcattccatttaagaatcacagtctggctaaagttgatcagatcagtgccctttctccttcacaataatctgttgttccgtcattttacaggtctagaaaataaatagttaaattttctgtcttaaaattagttgctcaattaaaaatatgaaattttttacctttttaaaaaagcaatttccatcctgaatgccaattaggcatatttagctggaatctcctggttatatgcactagaattcacagcttatttcaagtaacaggcatttagttataaaaaaacatgcaaagaattatagcccttcagtcttctgagtaagggtttatctttgcaagggcagaacctagagcaagccccagctttgggaagagccggagttgacgtagtgctgggccatgggattgttactctgtgtgtcagcattaaaatgagtcagctacttcatccttattccgagtttacttattgcctggcttattcatcctcaattctctgcttcttagtttgtgctgtctcaaacctttggcatcccgtcattccagtgactctgactccacatcataacccctgtcatcccaacccctttgggcaattatcttgatatttttaaggcaaacttctctagaggggaattctgatcttttttgccttaatgcatgccacaggccactggccttatatgaattttctctccttgggtcacttgaccatgattgacttagtccatggaggtattgggtgagaagctccagagtcttacacaaggactacctttccataaaagggcatacaggggacaatgccactggggctgggagttgccagaagccataattgacttggttctgcaacaccattccaatctaatgctaatctcccaatagacagaaatcctacctccttagtcatcatgccgtgtatgagaaggttttcattttatttttgtaatttaaatatagtctcattttaacgatttaccaagaagtatgaaatctctatcatcgttttattacactatattaatgtattattatggtccctttgaaacaaacaattctccatttgagttcagatagtcctcagcttatttcattttttggagtaagttaaagggacattattttcaataaaatagccagagttcattcattggctagaataaataaaatgttccttgaaataccaaaaaaaccaaaaacccatcaaattttattacgtaagcattctgagactctttaccatcttacaagatgcattatgtccaattttagttgtaaacatagaaatctgtagtaattataatgttctcaattctcctacaaccaaagcaaaatcagtaaaagagcaaactttttaaagcctaaaatttgggatctatcatttattagtgatgacttagtgccctaggacagagattgacaaatgttctatgaaaaggagcagatagtaaatattttaggttttctgagccatatgttctctgctataactactttcttctgccattgtagcacaaaagaagctatagaaaatgcataaatgaatgagaatggatgtgtttcaataaaattttatttatggatatagagatgtgaattttacataattttcatgtcataaaatatcactcttttgatttttttcccaaccattttagaaagtgaaaaccattcttaactcagtacccatgccacatttgcctctctctgccctaggaaactaaatttagctttcaaagctcttgggaaatttaagtacaccatttctactagtttgaggaaaacagttttatttcactctttttatcgtttaattttataattgtcctaaaaggttattttactgttgatattaatgtttaagttaattatatatatatatatatataatcatgccaagctttattgttttatcccatgtataatgattccattaatatagctattagtatcattttatctttattacaggttatttgagacactgcagtccctgttttggtcaatatttgggctcatcaatttatatgtgaccaatgtcaaagcacagcatgaatttactgagtttgttggtgccaccatgtttgggacatacaatgtcatctctctggttgttctactcaacatgttaatagctatgatgaataattcttaccaactgattgctgtaagttgaccagctttattttaattcaatgtttcctctagaatgtgttgttcttagctatactccatcttcttatcatcgtaaataaaatctataattagctattgattagacagataagaattataaatggttaatttgaaatttctgagcagtagcacactatatgtagctataaattaatctgattttgtcatgttacacatgattacaaagataaaccaaatccattttgccaggcagccattggctatgggaagtagtagctgaggtctgactaataaacaagcagctcatctctgcgccgtgtacaataggttttgcctcctgtcggtccatttaacctaccactctcatataagcgaagtcatccctacaggggaagatacaaaagataacccagagaggagtctgggaaggggagaagccacaggattttcaatttcttaaagctcagggaaagcaatgtattaagagaagtaatattaacttctgtaggataatacacgatacaatacatgtttttttgaaactctggaatctaaacaacgtagcacaagttatttatttattcattcaatacataattactgggtacatactgtgttttccagtactgttctgggcaccagaaatacagcaatgcacaagaaagacaaagttgaacttatctgcttgaacttatatactagtgatatacgtctaggaccactagcaatagcagcaaaacagaactcttagtggaatgaaatatagttaagtctttcatatttataccttagacaagtagcattttataatcgtaattatagttttcccattttcttcataaataattacattccattacacctttgaatctatggttaaatctctgaagtgttattactgtttttttgtcaagcaaaactctgaattttacttcaaccatccttagggaggcaatttttctcataagacactcatcactgatgaaaaactgcatagaacatgagaatagatggtttttatttattgattcacagactaaagtattccaaatgcataaaaaattcctctggaaataggtaggtcctaggatttggaggttaatacccgaatttgtggatactttgaatttcatttaagcatcttacgatctgaaatttttataaatagactctaaatttttgtgtcagaagttctatattctcctaatcaacatatttccaaaatgtgcgttctgttttccagaacgtcagcaacaacaacaaattagaaggcctttaattatcaagctagatacaaggaagctgccagcaatttggatcttttaaaacattaaatgtcccaatttcatcaaggagaaaacactatttaagaatattatgacattttcttattgcttctttgtgaggtgtgcttttctaggtaacttcattacagagataagaatcatcttcaactctctatttagacttagcccaaaccctaagactatggagaaccaaagagtcactgagaacctgagacaggtgtgattcccaggactccatgcatgaagtctccttgggggcacgaacatgccaagcatttgcttacacctgtcccagaatagcagaattttctctttttctttcttccttccttccttcctttctttttctttctttcttctttcttctttctttctttcttcctctttctttctttttcttgttaactgtaactcagagccatcggtaaaccatgaaaaagaggaaaatttaactgttgaaaggcagaagcacttatgtaggccccaactaaagactgctttccattcactcatttgttaattgattgaatatttattgtgcacctactatatgccataaacatgcttaattttcgggatacaaagaattaaaaagtccctgttttcaacaaaaaaatgatatagtagagataaaaagcaataaataatttcaatattgagaaaagaaatttgaggatgtcatgaaagtatggaagaggggaccttgactggggttggagataggaggcagctcaggactgatgggaggcagaacaggcttctaaggagagaggattcttaagccaagtttcaaatgttgactaggagttagaaggtgagtagtggaaggtggatctagtcatcaccagcttagagctttttatctccagattttctaagcaccatagactatgttatagaccctcttaaaatcctaaatcatgaacaaagaaaccacttgcttagtgattgcaataagataacataatttctgactcaccgagagtcagagaatcagaaggagctatccacaggccaatgctttatctaagtgattgcctttttatttccttgagccaaatctgctgagtcccattctccatgcctgcaggaaacaatatgtacaattctcttcaccaatgcagcataatcagccagaacctataaacttgtctagaaagaaagagaaaggaaaggagggagaaataagaaaggaaaggaagaggagggaaaaagggagggaaactgcagcttctgtgttccgatttatgtggatcaatccatattaccaaacatttgcttagcagcaataaggccatgcattctctaggtatggcgattcttgttcaaagcacagtctgtccaatatctggattaaacccatgttgcgcagaataaaaaagtatgcataacttattcatccgcacacagcaatttaggaatatcaaaatgaagcctagttgaagattattctcctactctaaaatatgagttcgtgtttatgatattaactggttacaatgaactattctgaattcttaaaatgaatgtatgcccagtctctaccacctcctacttctcagattttctgcttaaatcagatttatggctaaattaagaagagactggctgtcccaaatctaattgccacaaatgtaccaaagtttcctcaggaggttaataaagtggagtgagtaatacatgatgaaggggatagcctcaggattgtgggcaaccactggccatactcctctttggtgaaatctgtacaaagttaggtcaagattcaatggtgtgtcagagaggcccaattctacatttgttaatggaacttctttctgagtttatctctattggccgaaggtgggcaataatattcacatgaaaacatatccaataagacttttcctggcaacattgaaggctaagccatgagcatctgtggaggtagcattaatctaagcaggaatacaaggctttggttaagacagaaagtctatttctggcctgaatcaaatgaaactgcactaacatgagtctacagtgcagaagatgcaggctaatcttcaagtcataactaattactgcagtctttttaacatggaattattttagatgtctgtttcactgaagaaggaaggatgagaagtgacacgagagctgtgactaccctaggttaagccaccctctgaaatgtttagatgactgtctctgggagtcagtggtggttttagaagcaatttaattaatgttccaagagccgcttgaagtcaggttacaggatctctgtgagatttatggtaccttgttaattaaggaacctatcatcagttgtcatgttctcctgttcaggaccatgcagatatagaatggaaatttgcacgaacaaagctttggatgagttattttgaagaaggaggtactctgcctactcccttcaatgtcatcccgagccccaagtctctctggtacctgatcaaatggatctggacacacttgtgcaagaaaaagatgagaagaaagccagaaagttttggaacaataggggtaagaacacagcatgttagtattactctttttttaaattgtgtatttgaatatatttgtattctttattgtacatgttcaggtctttagcctttttgttcttactgattgcatgtcatgaacatttataacacatctcccatgactaaggcagtgtctgattaactaggatttcttcacaagtgaatttcctgcatcgagggcagtcactactattttaatagaagtcccgctcttcacacagccctccttgagttctgctagtcaaggctggggaactagcatactctgtcttaataccttgacttctaggtcttttcagaatgtgacagcaggttatttgtggcatttcttcctcattgtctgtttccccctctggatcgtatgctccatgagggaagggcacgtgctttggtgacctcaaattcttcatgcctaacaaagtccctgcacaaagcattttatgcttgataagaattctcaattaaatgattgactgaatattataacttaaatatgctgtgccaactgttaagtgtgattccagaatatgtgtaattactcaacatgttgcatctactccctatcatattagatgccaagaatttaggcatctaaatatatatatatgtgtgtgtgtgtgtgtgtgtgtatagagagagagagagagagacagagagagacagaagagagagagagaaaggtgagggggcggggactgcccagagccatgctcctggtaaactggaagatggtatttccctttcatcattttggaaatcagggtttcaagcaattccagcagaagatacaccacgtgaagcttttggtgcagccataccattgacataagacaaatcattcttcacgccttcctcactttgtgttctaattttgaaagttctcatagtaatgttttggaaattaacactcatattcattagtcacttggatcttctcagtaaaattgctttggaagtatttttaaatgttatcatattaggattagcaagtaatattagagattaattaaaaataaaaaaatattaatttgttttcaattttattttacatggtttgtgactgcgatgccctaagagatccttaccactctaacttcattgcccaccaggcattgtcatcagcaccaaatggagctttctcctactggcagtggcattgattttcctctcatctcagtaacaactctaattccaaagagaaattgactggcaagtgaatgttacaaagaggtgattaggagatgcagttctattctttcccataaactattacccatagatttgggggactacagtttgagaatgtatctgaccttagaaaccaaagtcagattacaacaaagccttatcctgccatcctcatactaatttatgaactttatcactgaccttagaagggagtgaaattattttactccagatatttgacttttgtgttaaaagttttagaataaatgtaatagcttagttctttgttgttgtttttttttttttttttttttttttttttgagacggagtctcgctcagttgcccaggctgaagtgcagtggcatgatcgcgactctgcaagctccgccttccgggttcacgccattctcctgcctcagcctcccgagtagctgggactacaggcgcctgccaccactctcggctaattttttgtatttttagtagagacggggtttcatcatgttagccaggttggtctcgatctcctgacctcgtaatctgcccacctcagcctcccaaagtgctgggattacaggcgtgagccaccgcgcccggccaatagcttagatttaataagcaattactgcatgtgtcccccttgccgtaactgaactagaatttgaggagtgggaagaggtacgaaggcatgggttccatctttgagggcaccaattttaatgagagagatacagaaataaaaacagatatgttatgtagtatatttaacattataatacagtcacatgaaagaggttatgggaaaaatgcaagaaataattaatgcttcccttgaggtaaacaggacaagatttcaaggaagccagacttcagcttactcctttccagatcaaatatacttatcctttataccatctcattcttaaatttataagcatttttaattgatctctgataagatagtgatgattaatgctgtcataatatactacctttcataagagtattttgatttagaaagagcttctgggccaaaaaaaaaaaatacctactcaccaaagaaatatgtatttcatattttaattttaggcaatggcagagagaatcttggtttttaagataacaggaaacttgtaacaaaacacagggtcctgctctgatgttttaagagatccatctgtactgccaacaaaaagaatggagaaccagaccaaaaacttggcttccaaccctccctcctatcctctcactgttgactcatgggtaggattatgttgccatcattttttagaagcaaagaggagctctcagtcaattggcttttctattaaagtagtgattcattctcagagttaaacagttttatttgctatatattactggtctcaaaaggaacccacacatttcttttatgtgtttatatttgaattttttgctccaagctgatgcacagcaaggtaatttgaaactaatcagaatctcaaaccattccttttttttttttaaccattaatattttactaacattcaacaatggctatttggatgctttgggaatttatgccaaactaaaaaatattctgagttttgtctgtcttttccaccaatctagagccctgggcaagcaccagcccaatcaatatcaatgctgtctaaatttactctttctccatactgcatttccaaaatgaaaaggacatattgttttcagatgcctactcttagttgagctttatacattttttgtttatatgaaaataaatgataggtataatttataaggaagttcttgcttataaaagtataagaaacgctgggtgcggcggctcacacctgtaatcccagcactttgggaggcctaggtgggtggatcacaaggtcaagagatagagaccatcctggccaacacggtgaaaccctgtctctaccaaaaatacaaaaattagctgcgcgtggtggcacgtgcctgtagtcccagctactcaggaggctgaggaagaagaatcgcttgaacccgggaggcagaggttgcagtgagccgagatcgcaccactgcactccagcctggtgacagagcgagactccatctcaataaataaataaataaataaatgtataagataaatgagatataaattaagatggttgtattattaaaagaggggttaactgagaaagtaatatcaaaagtaattaatttttctgtgaatttatttcaacttggttaatcctcctgatagtttattatgtggacatacaaagacaatgagatacacaaacaactattaattaaaaggtgacatttaaggaacagtgacactcactttgtgaaactagcacatggcttagaatataccattataccccaaagggatcttagatatcatttagctcaaccatttcttttaaaagataacctgtttactttgcccattgtctcatgctctcttagagacagagcagggggaaattgctgggtcttccattgtttcccagttcaaactgctttccatcaccctctcttatttccctgagaagtctggtgaacatgcagcaacaccttccctgttgtgtcttttgattgttctcagcagcctttgcagatcctatcattgttttcagctgcctcttagactcctgtgtcccgaatcccttgtttaccaggctggtttaccttctgcccttatcctcaacttgcttatctttatgctgcatttttgaagcagaaaattcaagctacactggaagtgacttcattctttgaagtatttttctgtaaccttcccatttgtagttcacttactgacactcgtcacccagcctttgagtaaatgtcaccctgctgctcattccattcacgttcccaggaaatgcctgggaaaccagtactcttcagggttgctacattggccactctctaggagcccattattgatgatcttatcgtgctatttatggcttcccagtaatactgatacaactagctctgaaaactcattaattcgtatttctttgtaactctggacttcatttaatggttgattgggagttccaggtaaattaatctttcacttgactgctttatgggagaaagcataaatgaagcagaaatgctgtattattgagcacaacatttgtgatagaaagcaaacccattattgagagatgcttcctctctgggctattataaaaatcccacgaaaaaggcagcctatccaaataagaaacatactcttaacttgtgtttttgacattgcttcctgtcaaatgttttgtttaacctcattttatcagcaaatacccttcttatcattacagcatttgttctcaaatattttagcatacaagaattgtcaggagtctccattttaacaagcatttccagtttacaactttaactagacatttctattcaagacagcattggtatctaccacaatttttttgaagttttttaatctttaattcgtgtgagtacatagtagatctgagctttttaagctaaaacgaagccaggcttcatgctgttgctcaaaaggtcccgatccatttaattcaagtacgaagatgctattataatacaatacttccccaaagcatttcattaatgtgagacatatttaatgtcacagactaggtttctaaatgaaatgtttacatttatatgttaccataccgaaccaaaaaaaaatactagttcttttgataaaatcataaaaaatgtttttaacttccttagttttatgttttccgctttttggttttctctcaagcacatggtgagaagaacaggaggcaggatggtctctggaagatcactctgagcatcacacagctctgagatacaggtggaatattcaagcctgactagctgccccagaaatatgcccagttaagtcactacaaatgaaattagaaactgtgaatagattagcaacagctatcatcactaaagaaaaaatgctcatagtacatgcctctcagacttcatttatagtggcgatttgtcaaaatgtatcgctccctaatctttaggacgcttagtaggcctaatgacaaatcttacagatatgacagttttcatccgtgagtgtctccggattcctaaattactgctgcaagatttgttggcagggccttttgatgaaactttatttccccagcggggatatatagaaattaattgcttgatattcttggtatttcaagagtgagttcctgaatatttggtttgacaatacaacattcaggcatttcacgtgaattattttgatatgcttagaaaatgtgttcatgaaaagcagtaagcagatgtatgctataagggtgcagaaagactgtttatagagaacaatatgtagatccatctgcaaagaagccaaactgcaatttttttgtaaagggatcacatcccggaatgccctcttgcctttttagttttcgtgaaaggagaagaacacagcaagctgcatggcttaaggaattcaaggagcaaagcaaagactaaaaggcataattcatgggcttaaaattcactgctagaccaaaaccagagtggaaatgagagaaaacggcattgaaaattgacagcagggactagctacatgaaatgagcgtgacattccacatagtggacctggagagaaccggagataagagtgacaaaatgtcacagctcactctccagagacctctcttttctagctgcaaaatcttccctgctctaaagaaacctgaaacttctattgaaattccggagtttccttgcagcagcagcagtttctcactagatggtctttctctttaacatgagttctctgatccaaacgctgccattgtcctgccctaacaaattaggaggaacctgcaaactgtgaattatgctaatgtggcaacaggtatgccctcatcttctccttgaaagctactttgccaaggaatattccacacacagtctagtgacttctgatgtagtttgcgaagaaaagtgccaacctaaggagaacttcttccaaaatatttttcctagacactcagttaaggaagaaaagcccttgatttgtcacaaaatccattttttctgtcttaaacacaactcacaaccaatctagtttaacaaaaaaaaaagctgcaaaatgcaagttccagaaatttctttcttttttttttttttttttttgagatggagtctcgctctgttgcccaggctggagtgcagtggcgcgatctgcactcaccacaggctccacctcccgggttcacgccattctcccaccttagcctcctgagtagctgggactacaggcgcttgccaccacacctggcaaatttttttgtgtatttttagtagagacggagtttcaccgtgttagccaggatggtcttgagctcctgacctcgtgatccaccctcttcggcctcccagagtgctggaattacaggcgtgaaccaccgcgcccggccacaagttccagaaatttctatgtgatattgtacacttgagctcattcactgagaaatcctttattcctaacacaggtctaccatgctataattctacctaagttattatttttagtaaaattaaaaaacacagttaatgcagattactctgtcaaagtttaacatgcaaatggcttgaaagaaaattaaatacccattttcttaggtattaaagctaaatacccacttaggtatttttaaatgaaatggctttcattatattactttgaatcacaaattgttcatttctcctgttctcggtcatttccagtgataattataagaaaaagatatcttctcttaaggtaacaaatccctttgaagttcagctgatctttactcaacaaaaaaggatatgaatgtcctaaatataactgatggtagttctattgtgtaatattcaatggtgtcactaattgccaaaaattattgtgatgtttattgcaaagagtacatatattatgagttgaattgtatgccccttcaaaaaagataggttgaagtcctaatcccctatacatagattgtgaccttatttggaaataggatcattgcagacatacttagttaaggcgagattatactagaatagggtccttgtaagaacatggccatgtgaagaccgagacccaagaaaaacaccatatgagattgcagatgggcacctgcaagccaaagaactccaagaattaacagccaccaccagaagctaggaagtctcattcccacttggtgctactgctaaatgactatcaatgaaattacactttcatcacatgtcactcaactagtcaaaatccccaggtgcctagtaaccactggattcatgtgccatctgaaattctacattaagagtccacgctaatttcccactacaatctaatctgtatattcccagtagcaaagactttgcaactatcctgccagaagtctccataatgtgcctctcactttctaaccctagcatatttgctcatcctactccaatcatctagaacacctgtgcacctccccttgtcctaatcctgtgattccttcatgacccatctaatactgcattctctataagagggctgttacggcttctttccttcacacagtattacctccttctcccctgtactcaaatatcacacttacagcacttcccgtgttttcttttgtatttgccttcatgtgtagtctttcatgatcttggcaatccaccttttggactatcagccatttaagggcaaaagtgtgctttattcatctctggtttcttgcactccactgccatacacatgtagtcatttaataaatataccttaaattagccctacaagttaagagagttctaattccaaaatggagccttgagacaagctggctttactccctgccatggaaaaccaaacccaaatatacagtgccaggattatcaccagaaatatcccaggactcagataggaggcaaagcccatctaggggtcacagagaaatgaaaaactcctagcacatggtaaaagaatcgtatttctggccaggcactgtggctcacacctgtaatctcagcactttgggagattgaggcaggcagatctcaaggtcaggagttcgagatcagcctgaccaacatggtgaaacccccgtctctattaaaaatacaaaagttagccaggcgtggtgccatgcacctgtaatcctagctactcaggaggctgaggcaggggaatggcttgaatctgggagacagaggttgcagtgtgccgagatcattgcactccacactggtgacagagtgagattctatctcaaaaaaaaaaaaaaaaaagaaaaagaaagaatcatatttccatatccaggatgcccttctcttcaatctgcctggcaccaagagtgtaaataatttctcccaactcaaggttcctacactgaaaaaactgagatctgaggtagacaaccagctttcccaatatcttgcattccctagaagtaggcttctccttgcctcaacccatgaaaatcatcctgagtccctgaagagaaatatccctgagctcagccagagacaaaggcaaagatggaactcccatccccaggcctggagactctgctctgtaactcgaccaaatgagatgccaaatcagagtggcttctcagtagcgacatgttgtaggaggtacattccacagctccactaggctggaacccctagccagccttctcttttgctatgacctctgaattttcctcagagtttctatatcaacgctcacatatggctgtctcattagggtcatagcaaaaattcaatgtcatgccgaaaagttcataaaacttttgggctcctccaaagatgactgcctacagagtctgggtcacatctatccaaatttaccagaagtattctcttactctatcacttacatgcaagtttcctacctctaaacctctctactgccaaagctgaaggcatctaacgatttagctgaaggaaatgctccacaagcatgaattaccatcaaaatcatgcaaagggacacagttaaatgtaagtatattattttactttctcagaggtaatcataatatgtgtcctactatgcacaagctttgagaatcagatttttaaaaggctattaagtcacattatcaatcaaaaaggaaaaaaatgcaaagaggacaagaactaacattagttagcaacagatgccataaatctcttagctcatttaatcttcagaattacccatggagtttatcttcaccctgcaaaataaaaaatcagggaagaggtagggtgtcagagttaaactccctgactaggcacagtcagcttcaaacccaggtgtaacccctgggaccatattcttaatatcacaccacactttctcctagaaagtaggaactggaagggcataatggtgatcactaaacagcctattctgtcatgctaatcagggaaacagagattaaacagatgagagctctatcagccgcataatttagcattaattatttggtgagcgcactgcattcattttgagttttaggttcagaagacagttaacctcatccattctttttttctagctagaatgttgaagttcattgcctgataaaattttgtgaaactaaaaaatagttttgtggtattaccacataattgtggaatataattggttggcaaaaacaatgaatcgcattaacttagtcttaaacctggactatataaactgaataacgcctgaaaggtaccatagtgaacatttttagtgttcctctctctttttgacaatccattttgattttttaagttttttcccaagaaaattaacctagaattaccatttaaaatgtagtctttgacctttttatatttgtattaaaattttttgacgttggatgagtaagattctactgaaggaaagacagtttgtactcattttaatactaaaatgtatcatgataattttcacttattactcataattttctgattctgtcatcctcaattgtagtttgatgttaaagaaatttaaagttaaatcctgacttctaattgctctctgttgaaaatttcctcattggattttagaaggataggattctaaaacacagtagtgaaatgttatagaatcccaaaacaataaaaattaagtagactaaattctttctatattaaattaagagtttctagctacttaaataatgaaaatcagatctctgttataatatttatggtgagaatgttaaagaaattgatgtacgactcactttagtattttagtttaagtaaatttaaggagatctagaagactgtgtgtttccttttagaagtgcagtttgtcttaggtttcagctgagctatgtctcaatatgagtcagacacctccatctggtggcccagccgtaaaattcccatgccatactttttcaagctgctctctacatttgtgttgtttcaaatttctgagtttttaaattaataacttaatcctattttaaatgtttttctcaaaatgtatttctcatgcaaaagtgaatgatagtcaaaataattagtgacctttaggaacctaagcattgtctcatctgtttctacaagtcactactaatcatgaaagacagatgcatccttatggccagtgaaaatagcattttcttctatttctctgaagagaagaaaagagtttcttttaaattgtttaatatttaaattatcatttcacagtgatgtaggcacagctcttttcaatattctgttttatcagcctatgattatttattaaggaacaagagcaaaagcctcattttaaaaccaaggtatatcatcccttttgctttctcacaatttaccaaattaattcttttattatagagatatttttattttatattattttgcccaatattcttcctgaagaatcagtgctgatgtttattcaacatacataaaattgggattatgtagggtttttttctaatatctttagaatacttgagaatctgcaaatatataactttaatgtcatttattatttcactcaactcataatgggattttttcaatcattaaacaatccatctctctattctacaatcccaaatcactgccctgtgcttaccccacctctgctctcaaaccattctgatgccttcaaaatatgagctgggactcacatttaattttttaaatgagttaataaatgctgtgtttcaacagaatcctttatttatttattccgttaaatccagccatctatttaaacaggaatctcctcttactgtatatatgattgatattatatatatatatatatgattggagagttcagtgactaatgaggcttctgattacctggtacataacataactaacttcttaatcttgccatgttaatatttatgaaaacttttaaatttttatttgatatgtcctatctctttctcttagcatcattccgtcaatgttgagtgcatattaactgtaattaactaattttccttcatcctgtgtcctgtatgagaacaacagttctgtcattgttaacttattctgtgtttcaaatgtcatatagattatacactcttgttcactcattcttttgattcatgtgcagcactctttagccattgtccattgactagtaaaactcccactttgaagaaataagaataaaaacattatcgattaaaaaaataaattattttttagaatagtaatataacagtataaccagaaaggaatgtccttttccttttcagaggcgagctgctgataacttgagaagacatcaccaataccaagtaagttgtccttgtactatgtcttgaaattttcactaaaataaaatgcagtccccccttcagaactgactcaggaggaaatttatttactcattgagtatcaatactcttgttctaaaatgcctcaggaagttatgaggaacctggtgaagcgatacgttgctgcaatgattagagatgctaaaactgaagaaggcctgaccgaagagaactttaaggtaaccattttcatcttcatcacaagaggcagattgtgcagaatatggatccagatagagcacatttaaaatcagagctggaaatgcagctgtgtgttccagcaagcctgtgtggcttctgatttttcagctgaaaccctacagaactgtaaaaagaaaagaaaagcaagtggtgaaatttcttctcaaaataaattgttttcaaacatacagagaaaagcctagtgcttaatggcattctgacttacctgatcccagagtgagcttctgtttctgaaatttcagcctgatttttaaatccgaaacatttactaactaacacactgacaacaaaaactttgtgtgttctgaaaaactttgatagcagtgaatttaaggtttgcatttaattgtaactaatacacttataaactttctccttgatagtttttaaattgtgtaagaggaaataagtaaaatgtgtgaaatattatatgcttgaatcacatgtttaaaataatttagtttaaaattattgagtgattgtttagagattttggaagaatgattaaggtcaataagatcttacaggccaaaacaaacaaacaaatttaaaaaaatctataggagatatttaacatagaaaatagcaggtttgaacatgagaatgaagtagtgaattaggtaagaagatagagaaattacaaaacttaaagtgcaggtggaaaactagctagaagcccagattttcttcacagccataaagttcaaattgtaatattaaatgattcatgttgctttaggagataggttggggcaggaagccaccaagaaggttgccatcagggtaagagtgagaattcagttgtcccaaaagacaagggaaaaggatgagtctaagaaatgctgttagatccgaagaaattcccaggatgtagaggctgacccagatgtagggggaaggtcctctttaagacagtaaacaactgcaagtaactaccaactcttaaattagtctccacttaattttcagacatccctttggacagaaaaatgggccaatattaaaaatcttataaaatacaccccagagacagtgaggtaacttggcagcagatgaataatttggagagaaactgtagtcccagggaaacccaatatactcagctgcacgttggtggcaaagataactcacgtttctttttgcatcagccttaggaagtgtccttcccaattccaataaggaaattagtcgacatcaaaatgacatcaagtatccgtgagagaactgggaattctaaatagaaccacagtagagtagaatccttgtttttaaaaaggagtgaaaacatttctgacccatatatgagacgagaaaatgatgtttccaaatgtttaagtcataaccgaatttttcattttaaattctacgtaggaactaaagcaagacatttctagtttccgctttgaagtcctgggattactaagaggaagcaaactttccacaatacaatctgcgaatgcctcgaaggagtcttcaaattcggcagactcagatgaaaagagtgatagcgaaggtaatagcaaggacaagaaaaagaatttcagcctttttgatttaaccaccctgattcatccgagatcagcagcaattgcctctgaaagacataacataagcaatggctctgccctggtggttcaggagccgcccagggagaagcagagaaaagtgaattttgtgaccgatatcaaaaactttgggttatttcatagacgatcaaaacaaaatgctgctgagcaaaatgcaaaccaaatcttctctgtttcagaagaagttgctcgtcaacaggctgcaggaccacttgagagaaatattcaactggaatctcgaggattagcttcacggggtgacctgagcattcccggtctcagtgaacaatgtgtgttagtagaccatagagaaaggaatacggacacactggggttacaggtaggaaagagagtgtgtccattcaagtcagagaaggtggtggtggaggacacggttcctataataccaaaggagaaacatgcaaaagaagaggactctagtatagactatgatctaaacctcccagacacagtcacccacgaagattacgtgaccacaagattgtgatacttgaaggaggaagcgtttaccatacacatacgtattttccgtagtgctctgggtgggggaaaatgtttaaattgtattagcaaatgctaacttacactttatagcgtttatcagctgtggcatattacctgtaacatgtttaaataaggcaaaggcaatcaaaaacctttttgttttgtagcctgcttttgctttcacaatttgtcttacaattgtttttgttaataaataaatgcaccttgtattcttgtactgttgcaataacccacagaaacattttagctatctttttcaattaaaacaaatgcaatttatttcatgtggtagttgactcctaaaatagatatttttatattcaaaaaccaatgtggctgaaatattatagcttttcataattttttagggtctttagagagggttactcaccaaggacttttcacctagtcctacagtttggctttaaaacacaaatattaccaaattatttcttaacgacatgtaaataattattgtacacaaagcaaacaagtcttcttctcatggagtcatatctaaactccctcaaattcagaaaaactttgtagtgttttaggttgttccagggtttcctttcagtaagtaaaagaagtgtttgtcttaatacattttgatgactgatgatttttaacgacattttgtcaggaaaaaaactcgcccctccagtttttttaattacctatttcagattcaactgcttatcagtataaatatgagtctttatgaataactgaatttcaaaaatatggcaagatttctgttataaaaaaataataaaccataatattgtaagtatcttaaacaagcaagatgattacatactaataatatccaaatgaaaatgaatttattctaacaatctaaatctaagtaaagttgaattccagtattttcaatcaacgcaatattgtaatcaattcaaaagaagtacaaaaaaactagcagtctcctcttttcaccagtaatctttatatatttctttaaaattaaatcactcaaaaatcattattaattttatcagcagatatagatatatagttttgcctataggaaaaacattcttatttcttgtttttctttctattgtttgcaaggtaatttagcttataacaattcactgaactattacaaggaaagtgttcgcaacttacataaaattgatactagaaacttaaagcttaaattttacattgcttgtgtctatttaagccactacgggaagtttcttcaccacataaaattagcatttatttcaaatcaatagaaaaatgctaagttcattttatttcaaaaattactctgcgaacctcagaaattgcatgtgatttatcattggccccaaactgaataatgttatggcactcagtttctcattaccaaacatcaaaaataaggaataacagcaataacaatgccagcctctgttctattcctatacacctgttaacatttatgtactgctctttacagccctctgaagtagctcctgtttttatccccatttcacatatgatgaaactgagaccagcactaactggctaaggtaatacagctcatgatggagctgtgatgtgtccatcagagccattcccttcaccactgcattgtaactgcctttcagaacataaaaagagcaagttataaaacatgcatatacaggggttacaattgccacttctgaagtcctataccttgagagagaatgagtttggtatgcttcataagagtcccttcttctaaagcaagagaagtgtgcaaaatataaaatgtgctgtatttgattctttagactaaattacattaaagttagtagattttaaaaacatatttattatgtgatctcagaactcaatttgaaatactagattttaattttcagaaaagccaggagcactaagcccctgttcactcctaaacctggtttttgggaatttaggaatgggccagatagatttggagaaacacaagcctaaatgaatgcatttactgtttcaagaacacctttatctcaagtatattaggactcagagcaaatcctggggctactgaaatactcatttttttctaaatcatacctacagtagtagagaaattgtaggcctattgttaatatttgggatattttctattaatttctttttgcctctcttgtgcgttgttgttttattttgttttttcccaaagtaaggacactatacataaccattttacatactttaccagaatttaatttcaaattctctctgttccgtcaagcaacaccaataacagtacaagcaacaaaaccttttttcccccagtagcttatttatatcaggggttaaggtgctgacattttatagggggacatgatggtaatagaggaatgtatttggagcaagtaagaccctccttttcagtgccctagaaaggatgattctaacaacccccagatgttgctgacagatgtgtttatgagtatgaacaaagtgctggatattattagtacccgatgttactaatatcactagaattgaatgctattctaaatacgtagtgacattatgtagcattaatgaagatgaggagtagggataaaataagaaaagtcaaacaacagcaggatagcaagcaaagaaatactgtttctttgaggtttgtaagtgcgtacttcagggtgttcgtttctattcatatttctatccacagaaatttctaaatgctacagagaactttgaaattaccttcatttacataaataatgtttctcatttttcgtactctcttaatcttaaaaaatctgtttttcttaaattttgtgtctgagttaggtgaaggagtgtgttgaaaattcagtttaatagactagcaggtaagtttaaaacactttgtttatcacaattgtattttggaagtcccatttataagaaagtatgctataaagatgtacctcattattcgtaataaaggttttccttaaaatttctgtgcaaataaatctatattaacttcagtaaggaaattggctatattttttaaaatggggtgaattattttataaaatcatgagtaatttttcaaagtgctaaacatcctcaaaatgtatctgtttcatgaattgaatatttgtatatcaaattttcttaaattagttactctatttactggatggcaattaaactaatgcaaaaacatactcactttcttgccttgacgtagacagcaacttgaaatactttagtgatgaaacaaattgatgaaaagtcaaggatagtagactcaccatgctgttctcaaagaagcaaagtcaattttctagcaaaggtggaggaaacataagtaacaatagcataagaatatattcttctaacattcaataatccttaataactctgggatttagctgagtaaatgactatccagtctcacagctctttattgaagagaggccaccaagttttgaaatctgtccattcttagtcctcatgcattgtatttttagctgtcttctatggtgtatacagctgccttccatgctcagtgtccttaaaactcaacctagtaagaaccatccattgtggccctgtaaatatgcttacaatatatttttctttctctgtattatctgaaattctgacttaaaactaaccatagaatttagaaatttaatattactggcattcctcttaacttcaaaaccattattctgattttacaatgtctgaaaagacattttatttatacagtgttatcacatgccttttttaatttgaattttagaatcatgttaaataagttcactgtagataactggggaaagtaaagcccagggaatttatggaaattatctaaatttacccatgtgtttggtggtcaagttggggcttaaacaaaaacctcctcatctagatatttggatgaggcatcacattataaatgccttgaccactgactttttatttggggaacattttgtcttctttgcccttgtagaaaatatagttgtccaaacattcaagttaaaattcagaattaataccatattatcttttgtttttctacaaagttgtgttaagagaatttttaaaaagctggtttcttactgttttcagaaaatacactgttcattttcactggaagtgtagattttatgataacctgtatgcatactggtaataataaaatgtattaaattatatcaaagcttctcaactgaaaaacattagagatggacaatgtacagttgaactaagattgggacaatgggaccaagcctggatacagtcacaccgttactaggctgacagtgaagacgtctctgcaagtcaaattcaccagtagcaaaaccgttaatttcctctagagctgcactgttcagtaacgtagctcctatactcatacggctattaatcacttgtaagtgtgacaagtctgaattaagatgtgctgtaagtgtgaaacacacaccagatttctaggacagtatgaaaataatgtaaactagctcataaatattttatgttggctacatattgaactgatagtatttatgaagtattgatttaaaatatactaagtaaatgagtttgatgtttctttttccttttacaatgtggctactagaaaactgaaaaatacgtatgtggcttgcatttgtgccttgcaatacatttctattggacagtgctgctcaggaacatttgtatttgtttcagtcagctcatgtatctccatcatctgaattgcaaaggtagaaaattctatctttaattactcaaaaaagttttgtgtagctctattaaagtttgcagtctctccttga

SEQ ID NO: 7 - DNA, 7727 bp, Homo sapiens
  source 1..7727: mol_type = other DNA
agttcggtgccagctgcgtgggctccagcttcgatcgttttccttggaatgctccaaaactcagcagcgactaagggaattccattggaatttgccgggcgtgctctcaccccgcacggcacccgcgccgtcagtcctcggatcccatcacttcagcccgaagattgcaactttgcagagacgaagaaatagcatggcatgaaacatggctcagttctattacaaaagaaatgttaatgctccctatagagaccgcatccctctaaggatagtaagagcagaatcagaactctcgccatcagaaaaagcctacttgaatgctgtggaaaagggagattatgccagtgtcaagaaatccctagaggaagctgaaatttattttaaaatcaatattaattgcattgatcctctcggaagaactgctctcctcattgcaattgaaaatgagaacttggagctcatcgaactactcttaagctttaatgtctatgttggagatgctctattacatgctatcagaaaagaagtcgtcggagctgttgagctgttattgaaccacaaaaaacctagtggagaaaaacaggtgcctcctatactccttgataagcagttctctgaattcactccagacattacaccaatcattttggcagcccatacaaataattatgagataataaaactcttggttcagaaaggagtctcagtgcctcgaccccacgaggtccgctgtaactgtgtggaatgcgtgtccagttcagatgtggacagcctccgtcactcacgctccagactcaacatctacaaggccttggccagtccctctctcattgcactgtcaagcgaagatccttttctcacagcctttcagttaagttgggaacttcaggaactgagcaaggtggaaaatgaattcaagtcggagtatgaagagctgtcacggcagtgcaaacaatttgctaaggacctactggatcagacgagaagttccagagaactggaaatcattcttaattaccgagatgacaatagtctcatagaagaacaaagtggaaatgatcttgcaagactaaaattggccattaagtaccgtcaaaaagagtttgttgcccagcccaattgtcaacagctgctggcatctcgctggtacgatgagtttccaggctggaggagaagacactgggcagtgaagatggtgacatgtttcataataggacttctttttcctgtcttctctgtgtgctacctgatagctcccaaaagcccacttggactgttcatcaggaagccatttatcaagtttatctgccacacagcctcctatttgacttttttgttcctgctgctgcttgcctctcagcacatcgacaggtcagacttgaacaggcaaggtccaccaccaaccatcgtcgagtggatgatattaccgtgggtcctgggcttcatatggggagaaattaaacagatgtgggatggcggacttcaggactacatccatgattggtggaatctaatggactttgtaatgaactccttatatttagcaacaatctccttgaaaattgttgcatttgtaaagtacagtgcccttaatccacgagaatcatgggacatgtggcatcccactctggtggcagaggctttatttgctattgcaaacatcttcagttctctgcgtctgatctcactgtttactgcaaattctcacctgggacctctgcaaatatctctgggaagaatgctcctggacattttgaagtttctattcatatactgccttgtgttgctagcatttgcaaatggcctaaatcaattgtacttctattatgaagaaacgaaagggttaacctgcaaaggcataagatgtgaaaagcagaataatgcattttcaacgttatttgagacactgcagtccctgttttggtcaatatttgggctcatcaatttatatgtgaccaatgtcaaagcacagcatgaatttactgagtttgttggtgccaccatgtttgggacatacaatgtcatctctctggttgttctactcaacatgttaatagctatgatgaataattcttaccaactgattgctgaccatgcagatatagaatggaaatttgcacgaacaaagctttggatgagttattttgaagaaggaggtactctgcctactcccttcaatgtcatcccgagccccaagtctctctggtacctgatcaaatggatctggacacacttgtgcaagaaaaagatgagaagaaagccagaaagttttggaacaatagggaggcgagctgctgataacttgagaagacatcaccaataccaagaagttatgaggaacctggtgaagcgatacgttgctgcaatgattagagatgctaaaactgaagaaggcctgaccgaagagaactttaaggaactaaagcaagacatttctagtttccgctttgaagtcctgggattactaagaggaagcaaactttccacaatacaatctgcgaatgcctcgaaggagtcttcaaattcggcagactcagatgaaaagagtgatagcgaagaagaagttgctcgtcaacaggctgcaggaccacttgagagaaatattcaactggaatctcgaggattagcttcacggggtgacctgagcattcccggtctcagtgaacaatgtgtgttagtagaccatagagaaaggaatacggacacactggggttacaggtaggaaagagagtgtgtccattcaagtcagagaaggtggtggtggaggacacggttcctataataccaaaggagaaacatgcaaaagaagaggactctagtatagactatgatctaaacctcccagacacagtcacccacgaagattacgtgaccacaagattgtgatacttgaaggaggaagcgtttaccatacacatacgtattttccgtagtgctctgggtgggggaaaatgtttaaattgtattagcaaatgctaacttacactttatagcgtttatcagctgtggcatattacctgtaacatgtttaaataaggcaaaggcaatcaaaaacctttttgttttgtagcctgcttttgctttcacaatttgtcttacaattgtttttgttaataaataaatgcaccttgtattcttgtactgttgcaataacccacagaaacattttagctatctttttcaattaaaacaaatgcaatttatttcatgtggtagttgactcctaaaatagatatttttatattcaaaaaccaatgtggctgaaatattatagcttttcataattttttagggtctttagagagggttactcaccaaggacttttcacctagtcctacagtttggctttaaaacacaaatattaccaaattatttcttaacgacatgtaaataattattgtacacaaagcaaacaagtcttcttctcatggagtcatatctaaactccctcaaattcagaaaaactttgtagtgttttaggttgttccagggtttcctttcagtaagtaaaagaagtgtttgtcttaatacattttgatgactgatgatttttaacgacattttgtcaggaaaaaaactcgcccctccagtttttttaattacctatttcagattcaactgcttatcagtataaatatgagtctttatgaataactgaatttcaaaaatatggcaagatttctgttataaaaaaataataaaccataatattgtaagtatcttaaacaagcaagatgattacatactaataatatccaaatgaaaatgaatttattctaacaatctaaatctaagtaaagttgaattccagtattttcaatcaacgcaatattgtaatcaattcaaaagaagtacaaaaaaactagcagtctcctcttttcaccagtaatctttatatatttctttaaaattaaatcactcaaaaatcattattaattttatcagcagatatagatatatagttttgcctataggaaaaacattcttatttcttgtttttctttctattgtttgcaaggtaatttagcttataacaattcactgaactattacaaggaaagtgttcgcaacttacataaaattgatactagaaacttaaagcttaaattttacattgcttgtgtctatttaagccactacgggaagtttcttcaccacataaaattagcatttatttcaaatcaatagaaaaatgctaagttcattttatttcaaaaattactctgcgaacctcagaaattgcatgtgatttatcattggccccaaactgaataatgttatggcactcagtttctcattaccaaacatcaaaaataaggaataacagcaataacaatgccagcctctgttctattcctatacacctgttaacatttatgtactgctctttacagccctctgaagtagctcctgtttttatccccatttcacatatgatgaaactgagaccagcactaactggctaaggtaatacagctcatgatggagctgtgatgtgtccatcagagccattcccttcaccactgcattgtaactgcctttcagaacataaaaagagcaagttataaaacatgcatatacaggggttacaattgccacttctgaagtcctataccttgagagagaatgagtttggtatgcttcataagagtcccttcttctaaagcaagagaagtgtgcaaaatataaaatgtgctgtatttgattctttagactaaattacattaaagttagtagattttaaaaacatatttattatgtgatctcagaactcaatttgaaatactagattttaattttcagaaaagccaggagcactaagcccctgttcactcctaaacctggtttttgggaatttaggaatgggccagatagatttggagaaacacaagcctaaatgaatgcatttactgtttcaagaacacctttatctcaagtatattaggactcagagcaaatcctggggctactgaaatactcatttttttctaaatcatacctacagtagtagagaaattgtaggcctattgttaatatttgggatattttctattaatttctttttgcctctcttgtgcgttgttgttttattttgttttttcccaaagtaaggacactatacataaccattttacatactttaccagaatttaatttcaaattctctctgttccgtcaagcaacaccaataacagtacaagcaacaaaaccttttttcccccagtagcttatttatatcaggggttaaggtgctgacattttatagggggacatgatggtaatagaggaatgtatttggagcaagtaagaccctccttttcagtgccctagaaaggatgattctaacaacccccagatgttgctgacagatgtgtttatgagtatgaacaaagtgctggatattattagtacccgatgttactaatatcactagaattgaatgctattctaaatacgtagtgacattatgtagcattaatgaagatgaggagtagggataaaataagaaaagtcaaacaacagcaggatagcaagcaaagaaatactgtttctttgaggtttgtaagtgcgtacttcagggtgttcgtttctattcatatttctatccacagaaatttctaaatgctacagagaactttgaaattaccttcatttacataaataatgtttctcatttttcgtactctcttaatcttaaaaaatctgtttttcttaaattttgtgtctgagttaggtgaaggagtgtgttgaaaattcagtttaatagactagcaggtaagtttaaaacactttgtttatcacaattgtattttggaagtcccatttataagaaagtatgctataaagatgtacctcattattcgtaataaaggttttccttaaaatttctgtgcaaataaatctatattaacttcagtaaggaaattggctatattttttaaaatggggtgaattattttataaaatcatgagtaatttttcaaagtgctaaacatcctcaaaatgtatctgtttcatgaattgaatatttgtatatcaaattttcttaaattagttactctatttactggatggcaattaaactaatgcaaaaacatactcactttcttgccttgacgtagacagcaacttgaaatactttagtgatgaaacaaattgatgaaaagtcaaggatagtagactcaccatgctgttctcaaagaagcaaagtcaattttctagcaaaggtggaggaaacataagtaacaatagcataagaatatattcttctaacattcaataatccttaataactctgggatttagctgagtaaatgactatccagtctcacagctctttattgaagagaggccaccaagttttgaaatctgtccattcttagtcctcatgcattgtatttttagctgtcttctatggtgtatacagctgccttccatgctcagtgtccttaaaactcaacctagtaagaaccatccattgtggccctgtaaatatgcttacaatatatttttctttctctgtattatctgaaattctgacttaaaactaaccatagaatttagaaatttaatattactggcattcctcttaacttcaaaaccattattctgattttacaatgtctgaaaagacattttatttatacagtgttatcacatgccttttttaatttgaattttagaatcatgttaaataagttcactgtagataactggggaaagtaaagcccagggaatttatggaaattatctaaatttacccatgtgtttggtggtcaagttggggcttaaacaaaaacctcctcatctagatatttggatgaggcatcacattataaatgccttgaccactgactttttatttggggaacattttgtcttctttgcccttgtagaaaatatagttgtccaaacattcaagttaaaattcagaattaataccatattatcttttgtttttctacaaagttgtgttaagagaatttttaaaaagctggtttcttactgttttcagaaaatacactgttcattttcactggaagtgtagattttatgataacctgtatgcatactggtaataataaaatgtattaaattatatcaaagcttctcaactgaaaaacattagagatggacaatgtacagttgaactaagattgggacaatgggaccaagcctggatacagtcacaccgttactaggctgacagtgaagacgtctctgcaagtcaaattcaccagtagcaaaaccgttaatttcctctagagctgcactgttcagtaacgtagctcctatactcatacggctattaatcacttgtaagtgtgacaagtctgaattaagatgtgctgtaagtgtgaaacacacaccagatttctaggacagtatgaaaataatgtaaactagctcataaatattttatgttggctacatattgaactgatagtatttatgaagtattgatttaaaatatactaagtaaatgagtttgatgtttctttttccttttacaatgtggctactagaaaactgaaaaatacgtatgtggcttgcatttgtgccttgcaatacatttctattggacagtgctgctcaggaacatttgtatttgtttcagtcagctcatgtatctccatcatctgaattgcaaaggtagaaaattctatctttaattactcaaaaaagttttgtgtagctctattaaagtttgcagtctctccttga

SEQ ID NO: 8 - protein, 2873 aa, Mus musculus
MRRGGLLEVALAFALLLESYTSHGADANLEAGSLKETRANRAKRRGGGGHDALKGPNVCGSRYNAYCCPGWKTLPGGNQCIVPICRHSCGDGFCSRPNMCTCPSGQISPSCGSRSIQHCSIRCMNGGSCSDDHCLCQKGYIGTHCGQPVCESGCLNGGRCVAPNRCACTYGFTGPQCERDYRTGPCFTVVSNQMCQGQLSGIVCTKTLCCATVGRAWGHPCEMCPAQPHPCRRGFIPNIRTGACQDVDECQAIPGMCQGGNCINTVGSFECKCPAGHKFNEVSQKCEDIDECSTIPGVCDGGECTNTVSSYFCKCPPGFYTSPDGTRCVDVRPGYCYTALANGRCSNQLPQSITKMQCCCDLGRCWSPGVTVAPEMCPIRSTEDFNKLCSVPLVIPGRPEYPPPPIGPLPPVQPVPPGYPPGPVIPAPRPPPEYPYPSPSREPPRVLPFNVTDYCQLVRYLCQNGRCIPTPGSYRCECNKGFQLDIRGECIDVDECEKNPCTGGECINNQGSYTCHCRAGYQSTLTRTECRDIDECLQNGRICNNGRCINTDGSFHCVCNAGFHVTRDGKNCEDMDECSIRNMCLNGMCINEDGSFKCICKPGFQLASDGRYCKDINECETPGICMNGRCVNTDGSYRCECFPGLAVGLDGRVCVDTHMRSTCYGGYRRGQCVKPLFGAVTKSECCCASTEYAFGEPCQPCPAQNSAEYQALCSSGPGMTSAGTDINECALDPDICPNGICENLRGTYKCICNSGYEVDITGKNCVDINECVLNSLLCDNGQCRNTPGSFVCTCPKGFVYKPDLKTCEDIDECESSPCINGVCKNSPGSFICECSPESTLDPTKTICIETIKGTCWQTVIDGRCEININGATLKSECCSSLGAAWGSPCTICQLDPICGKGFSRIKGTQCEDINECEVFPGVCKNGLCVNSRGSFKCECPNGMTLDATGRICLDIRLETCFLKYDDEECTLPIAGRHRMDACCCSVGAAWGTEECEECPLRNSREYEELCPRGPGFATKDITNGKPFFKDINECKMIPSLCTHGKCRNTIGSFKCRCDSGFALDSEERNCTDIDECRISPDLCGRGQCVNTPGDFECKCDEGYESGFMMMKNCMDIDECQRDPLLCRGGICHNTEGSYRCECPPGHQLSPNISACIDINECELSANLCPHGRCVNLIGKYQCACNPGYHPTHDRLFCVDIDECSIMNGGCETFCTNSDGSYECSCQPGFALMPDQRSCTDIDECEDNPNICDGGQCTNIPGEYRCLCYDGFMASEDMKTCVDVNECDLNPNICLSGTCENTKGSFICHCDMGYSGKKGKTGCTDINECEIGAHNCGRHAVCTNTAGSFKCSCSPGWIGDGIKCTDLDECSNGTHMCSQHADCKNTMGSYRCLCKDGYTGDGFTCTDLDECSENLNLCGNGQCLNAPGGYRCECDMGFVPSADGKACEDIDECSLPNICVFGTCHNLPGLFRCECEIGYELDRSGGNCTDVNECLDPTTCISGNCVNTPGSYTCDCPPDFELNPTRVGCVDTRSGNCYLDIRPRGDNGDTACSNEIGVGVSKASCCCSLGKAWGTPCELCPSVNTSEYKILCPGGEGFRPNPITVILEDIDECQELPGLCQGGKCINTFGSFQCRCPTGYYLNEDTRVCDDVNECETPGICGPGTCYNTVGNYTCICPPDYMQVNGGNNCMDMRRSLCYRNYYADNQTCDGELLFNMTKKMCCCSYNIGRAWNKPCEQCPIPSTDEFATLCGSQRPGFVIDIYTGLPVDIDECREIPGVCENGVCINMVGSFRCECPVGFFYNDKLLVCEDIDECQNGPVCQRNAECINTAGSYRCDCKPGYRLTSTGQCNDRNECQEIPNICSHGQCIDTVGSFYCLCHTGFKTNVDQTMCLDINECERDACGNGTCRNTIGSFNCRCNHGFILSHNNDCIDVDECATGNGNLCRNGQCVNTVGSFQCRCNEGYEVAPDGRTCVDINECVLDPGKCAPGTCQNLDGSYRCICPPGYSLQNDKCEDIDECVEEPEICALGTCSNTEGSFKCLCPEGFSLSSTGRRCQDLRMSYCYAKFEGGKCSSPKSRNHSKQECCCALKGEGWGDPCELCPTEPDEAFRQICPFGSGIIVGPDDSAVDMDECKEPDVCRHGQCINTDGSYRCECPFGYILEGNECVDTDECSVGNPCGNGTCKNVIGGFECTCEEGFEPGPMMTCEDINECAQNPLLCAFRCVNTYGSYECKCPVGYVLREDRRMCKDEDECAEGKHDCTEKQMECKNLIGTYMCICGPGYQRRPDGEGCIDENECQTKPGICENGRCLNTLGSYTCECNDGFTASPTQDECLDNREGYCFSEVLQNMCQIGSSNRNPVTKSECCCDGGRGWGPHCEICPFEGTVAYKKLCPHGRGFMTNGADIDECKVIHDVCRNGECVNDRGSYHCICKTGYTPDITGTACVDLNECNQAPKPCNFICKNTEGSYQCSCPKGYILQEDGRSCKDLDECATKQHNCQFLCVNTIGGFTCKCPPGFTQHHTACIDNNECTSDINLCGSKGVCQNTPGSFTCECQRGFSLDQSGASCEDVDECEGNHRCQHGCQNIIGGYRCSCPQGYLQHYQWNQCVDENECLSAHVCGGASCHNTLGSYKCMCPTGFQYEQFSGGCQDINECGSSQAPCSYGCSNTEGGYLCGCPPGYFRIGQGHCVSGMGMGRGGPEPPASSEMDDNSLSPEACYECKINGYPKRGRKRRSTNETDASDIQDGSEMEANVSLASWDVEKPASFAFNISHVNNKVRILELLPALTTLMNHNRYLIESGNEDGFFKINQKEGVSYLHFTKKKPVAGTYSLQISSTPLYKKKELNQLEDRYDKDYLSGELGDNLKMKIQILLH

SEQ ID NO: 9 - DNA, 205792 bp, Mus musculus
  source 1..205792: mol_type = genomic DNA
tactttaaacccaggagactttatttcacctccagaaaggcccctccagccttaatccacacaagaacataaaaccaaggtgtaaactaaaatggggagggaggggaggatcactttattgtgacatcatgacattaaccccttgttgacaggaatgactgagagtgattttggcgtattgcacatgctgtgtgatggaggatgcggtggtgatcctctggtggctgaggctgcttccttgtcctccccaacctcagtgcacaagtgggccagtctcagagaatccactaccatttggtgtagatgtttaacaagtctttggtcttaataagcaccattacaaaccctcacattaagggctttattattgtagtttataaatgtttcaatgataaaaatagcacgttacagtgtacacacacttaatttacatgtactgcaccatactcataagtgagataagctactgaactaactttggttgattgaaatgaagtatttgaactgagtacttggcaatttggttcctaactcgtgtctttattacagtgcatcaataaatctattttgagaatttactagcaccaaacagacaacagaaacctactgcttgcactcggagaagcaaagtttcaagatctgaagaccaacgcggaacagtccatcagatggaagcgcgttcctgtgcggaggctgggaagatagcccatcggcgtgaatggccaacctcagcggatattcatgtcccagttttcaggaatcaatacgcatgacagggtagctgagctactcacgagaagcctgagaaagtggttggttgaactaggatcatcactgtacctgggtgttgccattcaagagtggtgctcatttatacagatcgactcggtgaacaattgtaccatgatgtgaaggttctggcttggggaaaatataattctacctgcctaaggttgctttttcatttaattatttggtctctggatggtgaattaatgcagcaagatctgaattttcatcttcaggttatcgcccagttcaccactgaggtagtctttgtcatatctgtcttctaactggttaagttctttctttttataaagtggggtgctgctgatttgtaaggagtaggtcccagccaccggcttcttcttcgtgaagtggaggtagctgaccccttctttctggttgattttaaagaagccatcttcatttccagattcaatcaagtatctgttgtggttcatcagagttgtgagggccggcaggagctctaggattcggaccttgttattgacatgggaaatattgaaagcaaagctagccggcttctccacatcccagctggcgaggctcacgttggcttccatctcagacccgtcctagaaagacacatggaaatgggttaaatcccactaagtattctcatgctaaagaaaaagccactcaagtctcaagccaaacacagttttctgctcatgcagtatgttaaactgaaaaggcaaagctagtaggcactttgcctaagccacagatgtattctcaaaaatataaatagatggcaggaagccaggttgtactggagcagagtctctcagtaggtctcaaagtgtggtccctgaaccagcagcctggcatgcctggaaaccattagacatgcaaattcctgtcacctcccagacccctgggattagaattcctggggcttttcccagcacaccattctaacaagcctaccaggtgactcagacgcagtgatttttttttttaaagcttgcttcataggtttgttttcttttcaaagacttatctcctttcccaaaccacagcaggtgggttgtaggacgaatactcagactcagaacacggctaattcaagtttgttcactgacgggaaaccaactcttctaaaggacacacctatggacacacatccctgctgtgatgagctgctaacatctcactgagctttctgcttgcctctttgggaccacgtggactagatgctcccagcctggagccagagatctgggtgaatgaatgcattcctgactttacatagcatcctatgttcctgtcagtcaagtccttctcccgccaccacgccttatggctctttcctttctacaccttggcctccgcgtggggaacaccacatgtgcatgccattctgcccacttgctatccttgacttcagaccttgtcctgtctgcagacaccgggtaggcgtttgactttcttcttggtgagacggaggaaatgagcaagagcatgaaacctgtcaaactgccgctctcaagaggcagccaaaataaataaatacaataaaacaaaccccaaaccccatggcctcttgtaaaatactgctaaagccaggagaatgactgggctttctgtctggggagactgttcactcttggaggtgtccttggaggaaagcatagaagcctcagggcccttaggtatctgcagacaaggagaccctgatatacctggatgtcggaggcatccgtttcgttcgtgcttctccgtttccggcctcgttttgggtagccgttgatcttacactcatagcaggcctctggggacagtgagttgtcgtccatctcgctgctggcaggtggctctgggccgcctcggcccatgcccattccagaaacacaatgcctaccacagaaaggagcacaaggcagcttcggtcagatccagcagctctgatgttcagcctccctactgataacagactgcccactggacagtcatctgcttctaacagtcacaccagtgcccaggtatttagcttctgatacccagtgccctgagtacagttctttctctcaacataccactttgcatacttctttgtcccttcatctcccagccaaacatctgcagtgctcatgcagggaggggacagacatactgaaaactgaagaccaaagatgagtgagatcatgtgacttagtaggtcctcttttttatgaatcttttttatgaatctcttttatgaacctgggagtacggaaggtcccccaccagctgtccctctaggagtcagcagtgagtgggcaggtggcccatatctgggacctctttcttggacaacatatttcttcctctgctgtggccttgatttttatgttttaatttttaagatctgcatataggatgtcagctagcattatggcatagttgggcacagtatgttttggtgactttctttctgtgtcttccaccctcctgctgccacctctgttcccgccacccctccaccccagtcttctcttttttatatcctgatgttgttttttatgttctgtgtccatagcctaaccattgccttctccatcacttctgccccctgctggctcaagtgtggagtgctcttcctcaggtccttaaggctcacttcactccaatgctgccatcatccctccctaatccctgttctcagcaatcacttcgatttgacagtttactctggctgatgatactgaggtaggaagggaagtccacgcagtgtctgtgggttgatatgggtccatgctgtgaagatgtacaacacattcttatagacagcatgggtcagaggagagcttgcccaactgtgggaaacagtttaacttcaagtcgtttcaaaccactaaggccactggagttgactcatctgaaggcagataaacaaacccaagccctagagagacctaatccttgttcctttgctttgcagttgtcggagccaagctatggaatgagccccacacagtatctgatttgtttttgttagacttcctttctaaacgtgttgggaacctagagattatcctaaaacagctcttattttgcgggggggggggggggggtgcacccaagtgacatcacagggaggccaaagctgttataaaagggtggatttctaccacaaaatgtgcaccaaacttatgatagttgacttttaagggtggatttctaccacaaaatgtgcaccaaacttatgatagttgacttttctatgagagttgacttgtctgccacagctccttcctatatttgtccataggattcaaaatacaacaccaaggaaccgcctatctcttgtgtcttgctgtacttcagagcttgtttctagttcctggggtcttctaagtgcacacatttgtgtccctcttcacctagcagcatggaacatgaatgaacaaggaaatgatgggggacgggaaatgctgtacgatggctccaggaaataagcccaaatctgcaggcttggctcccttctcagaactcttctccagtattttcttgtcccaggagcaccatttataagaaatgtggctacaaaatcccactggcatgaagccagtttggagtgtcacatttttttttttttctgggaaaaatggttctggcattaaactgtaaaaaaaaatactgagtcagttgagagccagacagacatctgggaatttgggccctaccgctggcattccaagagcttcccacatagaattcttctaccttgaagtttatacagactggaataagtgtctgaaagccagtgtgtcatagacttcaggacctctgagttcatatttgggataagtgtgtatgtgattgtgtgtgtgtgtgtatgatgggtaggggcagagaaaaacagagagacaaagaaagacagatagagttctaattaagagagacttctaattaattaatattcatgaactaggttgagcgtggtgatgcatgcctataaccctagcacctgagaggcagaggcaggcagatctctgtaaattcaaggccagtctggtctacaaagtgaatccaggacagccagggctctgttacacagagaaaccctgtctcaaaaacaaaatcaagaacaaagtttcataaattagatatacactcaagtcattagggaagaacttggctttaaaaacttattaaaattttaagccattgataaaaacagtgttccttttctgcctcaactctcataaacatattcatattcacatcattcataaaattttctacttggaaaatacagctgattattctaactcacatttagtgtgctttttaaaaattatttctaatgtaaattcaagagcaaaggacaaaagatgccttaaaaacggtaagaaacacccagcaagttatccataacctgatgggagccaggaaagaaagcatcctaagtggagagagcccagcctgctccatgggagccatcagctgtgtagagtacacccagctctgcgtgggctgatcctgaggaggattcttggagaaaccaattagctctcagcaagatgtgaaggatatgagacagaagctgttcagtgagatatgaaccatgtggctgcactatgttgttgggtgttctaggagtttctagaaatctggatacgcctttacagatgctcctttcaaatggtttcaaagctaactggaatgaacctgaggattatagaaagcgcagttctctagtagggtatatatatatatatatatatatatacatatatatatatatatatatatatatatatgcctgcctctgcctcccaagtggtgctgggattatacatatgcatacacatacacatatacgtgtgtgtgtgtaatatatttacagagtcattaactgagggcaggaagaataatacttacccttggcctatccggaagtatcctggtggacagccacacaggtagccaccctcagtattagagcaaccgtaactgcagggggcctgggatgagccacactcattgatgtcttggcagcctccactgaactgttcgtactggaagccggtgggacacatgcacttgtaactccccagggtgttgtggcaggaggctcctccacagacatgtgcactcaggcactcgttttcatctgcagagaaaacaagacaacgttacatgtatgatacttgccatagaattctaaggaggaatttaggtcatgttcctcatgactgacaagctggcctataggtatgtaagtaggctctcagaaaagaaagcaggcagggtggccagtttggagagtacaggagagaggcagggaaggcaggtagcctctttccatgctgactaaatattgtacaagagtttagatgctcccagcaaaatacccaggatggcactaagaggagcctcagactccagttctcactaaaagccagtgctagtatgttttgctccataggagtcagaaccacagttatagtttggagttcagagggggttggaagagactggacagttatcagtatgcttgggtcacaagtgccctcaggatggatatccccaaagcagagacccacaaccccagaggctcctcttgggcttgaatgtgcaggtctaaggatggttgctatcctacaggggagtccaccccatttatctgccccaattatacttccttttcaaaacctctgcaagggcctgcaggtgcccagtcttaggctaagtcatacctcctggtatgtctgttttctctctgaatgcctatccaaaccagctgtggctccagtgtctgagccatgactaaagcctatgtggctgggagagattccatgcactcatttcaggcagtaacatggggcagggtttgcactcatttaaacaaaccttcctactgtcctgtgagcattaggaggcttctccaagcttgtgagatgagcagcagctgcctctatgcaccgaactgattcaccagcccaccaatacttacttacattggtgtatattcgttgttcacagtgatgagtctaagtaagacgttgtcacccaagtgtgctgtgtactttgaccatatttcccctcctgtacgctcctcttctctgcctccattccctttctttccccagacaatctcccttctatgttcatgccatgcatttgcagttagtaaataggtggggaaagtggaaggcctaggagttttgctgataaattcaaatactttgtgtcatttgtgtgtgtgtgtgtagtgttatttgtggatataaatccttctctctttccctccccttccatccagccattagcctggctttgtctatttgaagattctctaaatccaaagacctcaagtctgcattcaaggtcccttaggttacagggatcctaaactagaaaaatcaaagatacaatcaatcaatgtctacattcttttctctattttaaataaggaatgaagtacgttatagataccatttttgattatggtagggccaaatgggtcccaatccagctgaaagttgaaatctgctatttgcttctagaaaggaatggtgttaatggcccctgacctctaactcaaccaccaggaaagtgaaccttcgacaagctaagagtgggcacacaggtgaggctggtccaagagatcggctctgtatagcaccacactggcggaaccgtttcagtccatgacagtgctcactctagataactttatttcttgagccttctgagccctgtttgggattgggggcaacaggaaccccgaaccttaattgccttattctgacctggccacgatcctcctgaaaccaaagtaaatcttcaaggaacttgatatcatagagcgatccccagtgtgcgctgatgacaaacagtgcagcagaagaggaagatataatggcgtcaaggagtctaagggcatctcatccccattacgtccaaaagtcacttactctatcacatgctgttagattatcacttccctttggtttcaagtgggagagagaaactttcagggggctgttgttggctcagtaactttacatcagaaggaagttcaggctctgcgaggggccagcaaccaggctgcttttaaggacgaggagctacttgcctacacactggttccattggtagtgctggaggtagccctgggggcagctacacctatagcctccgatgatgttctggcagccatgttgacagcggtggttaccctcacactcgtccacatctgtaaaagaagcagaggctcctgtgagtcccacagcagctgcctctcaggctctctgaagcctcaacctgtgacgctcaaaggcgattctagaagtaaacccttctcctaaaaatgtatcctatcaaaacatcaagaatatctacaccaatatccagagatttcccagaaagtctacagataaaaatgtcgtaagtcacagaatgctgtggaataactctggaaactatctgtgtttattggtactggaattagaaactgaggactatcaataaggacgtaaaaatcttaagaattaaaatttgaacatgaattatacgtttgtggaagaattattccctgcatgtactgtccatgttgggggaatctaagggctctggccccaaatgtcagacattgaggctgagttactcctactaagttaaattgttaacctaaacaaaacaatcttcatctacgtagaagaggtgtgagttgttggtacagcaagtacatttctgagacatggggcccatgcaaacagcctggacgttagttgaatggtttccttgcttagagatgttttcgtctccttcattcttgcctctttgtttgcctaattattatttacatttggctgacctccaacttgtggcaatcctcctgcctctgcctctcaagtgctcagattacagatgtaggccagcacacccagaaaagatattagttcctgtaactcacagaagttgacagccacatacgctatctctacaaggagcttctagctggatccagctgagggctatacctaccttcacagctggcaccactctgatcgagtgagaacccccgttggcattcacaggtgaagcttcctggagtgttctggcaaacacccttggacccacacaggttgatatcagacgtgcactcattgttatctgggagaagcagtgggagaaaagaggagagtgatgcacccccaacgcttgaaaggaagggagaaggttgacccagagaagtccaaaatagggtcaataacttcctatcgtgtgtgcacggtccaacacgtgcacccccatacgctgaacatggtgtagtgttatccggcagcagaggggttagaaaagagtctctaaccagaaccggaacatctatgtcccatacacggctttccttcctacttaccaatgcaggcagtgtgatgctgggtaaacccaggagggcatttgcatgtgaagccaccgatggtgttaacacacaggaactgacagttatgctgcttggttgcacactcgtcaagatctgtaagaaagtgcaagatggagttcaagttgctgaacaggcctgggtaggaagcttcaccgggccagcccagaagtcacagcaaggcgctggcaagaaggcaggtggtgggctgagaaagaaggaggaagtggctctgcgggacccaaggcctagcagttcctcttagctaaagaaatgtagggatttgtcaacgaatcgatttgaaagatattctaaatgtttaaacgaattgtaaaacgaagtaaaaactcattctgaaattctccctagcactgaaagatctaagtgaagatatcaaaagagatgtcaagtctgaaaatctccttgttcccttaattcagttgatctaaacctgtggggtgagaaccctttcacagaggtcacctaaacacagatgaaaacacagatgtttacattatgattcttaacagtaacaaaactgcagttatgaagtggcaccaaaataatgttatggttgggggtcacccaacatgaggaaccgtattacaggaaggctgaggaaggctaggtaaagggaaaagaagaccgagaaccaccgccttcattcttttctgttgcatctagaacaaacttaagtgaggccatcagttggacttctttggttagtagtttctctttgaatgaaataaaattgaacaactcagaaagacaaaaatcaatcaatcaatctacctagttgattttgatgaaccaaacaaaaacaaaaacaaaaacaaccccccccccaaaatcctttcctatactatagacccaaagttatttttcatctcagcacagtctcccaccttaacagagtctgtattcgcagccttagcttccggactcacttttaataaagacatattaagagctaccaagtaagttggacttgaaggatggtgtctaaacgcctggaaattcaagagtgctttatcacagactcagcccctgcacagaggcacaagtggtgtgagatttgctagtggcagcctctgctccccagaggccttcctgcctgggaggtcacctgtcctaaccagagaggatgtccctgtgctcatcctcagatggagaccttcttgagctctctactgctgagaggccaacttctctcccctgcggctggtgggaaaacagtgctgtggtccttcagagttgtccagtccactaataggaacctttcagccgcaactggctgttctcagcctcaagaacatcttctcctatctccttccacccatttcctttgatattataatcaaataacatacccaaattgtacaaattaatgggagtgggtttcactgcgttatagccataattgcatgactcttaccatgatctcttctcttctctgcccacaccctttctccagtgggggggaaggtactggtcccacacccctcccagagcctctcttctacctgttttcgtctcagagtgagcgggacatgtatgtgaacatttccacatgtcaggcatagacaaacttggacttcatgagagtaagcagagagagggcatgtgaagtaaagactctgagtctaacagcctggtcaccgtcttcatcagcgtagatgatgctacttgcaagcaatcctaggtcaggaaagggtcactaggccttcacctgaaactccagtcattctcacctatgcctcctcctgctcaagttgcatgttgattccagagtgacagagagtgggcagggttcactgaggtgggcggtgattacagatgtgtatctttggggaagccattgcctacgctgaggtgagcatctgcagtggcccactgccacagattacaaaaatgtaaatttgtttccttacaaattgcacacagaagagatgtttcccctgaacatgtttctttgcttacatgagttacctcttgccaagtccttacacttgccagagttcacagggatcccaggtgaagctcactttttaagctcatgggcagatgttggtatcagggacttcttccccagctacaggatgatctaggacctagggccaggtcggcatagaagaacctctgacggtcttatctagtaagatgtttaaggctgaatctatactgagcagatttgacaaaagctagtttctagtcgaggagagagttctgcccagtttgaatgtttctcgattccacaactccttctgttaagttcttagagggcatggtggctttattttgcaaacccaaaatatagatagatagatagatagatagatagatagatagactagtttaattaatcagacacgcctctaagatcatggtatgaagacctcctagaccacactgttgttgaagagagagtgaataaatgaagaaatggaattggggaattaactgggaattagcctcagcagagccttggagagttggtaccaatgagcccttcatgggtgttatccatggatgcccatggggtatcaagcaaggatggttgctactactagccttaagtggcctccccgggctcagggttatcctcagggacccaccctctgcacaggcaggaagcccagggagcaggtcttgcagtttgtctcctgattattcccaggcataaccagaggcaggtgagtggattaagccaatgaccccctacctttgcagctccttccatcctcttgcagaatgtagcccttcgggcaggaacactggtaactcccttctgtgtttttgcatataaaattgcagggtttgggagcctggttgcattcattcagatctgtgattaaagaaagatagtatagacgtccatttgtaagactttctgaatgttccatatctatacctacaaactctgtgaagtatttgatgattgcctcatacttttttttaaaattgaaagtagagatgcattttagatttttagtgtggggttttctctcccataacctgaaatttctactcaggaataaagcattagaaacgaagtacctacctacacaggcggtccctgttatatccggagtgtagccagttttacagatgcagtgataggaccctctgtcgttgacacactccccatttcggcaaacatcatgaataaccttgcactcatcaatatctaggatagatataaatcacaataataagtacattaaaacatacaatgggcaacattgatacacaggggtcacttgagtgtaaaattttatataccgtgttactgtattaaggaccaaagtattaaaccaaaaggagacagaaaggatttcatatgcaattggttactcattgaacagctagtgaatgactgtatgaggtgataatgagaagctgttcaaacaaagggaaagccttaaaataattggtcatttaaaactgtgttatttttctcttctggatttctagaataacatcataaggagacatgttaggtcctctgctccatcttgtcatcattcttgccacctatgggcatcacatgagcaagtcttagcagagaaccctctggacaaggaaagtctaggttttttctctctgatgttgcatgttcaaaataagaaggaaacttctttaacattttctttgtcctacttgaagttaattctgaaaaatatcaaattacttaacaaagggtggaagaatgcagtcaacttccctcttctgtatgggaattaaccaggcctcttgggtaaatgatgggactaactttatgcagtttgctagacagagacacctgtatttgtgtctctattacagacagaaaggcttgaagactgtacactggtggcagtaaggctggacaccaacacaagcaatttgtacaagttattaaaccttcactgccaaaatgatcgtctaatatcagcagatgggtgtgcctgaccttctgcagtttactctgaggtacaggtaagcaccttttcactggtctcaggaaatgagtcctctatcatctcatctcagcatcctcccagaggacggatctttcctgtccaccgcctccatttacccacagcctttattctgtcattagtcacattttcccaacaggaagacaactctcttctaattctcctttatgtttttgcttctagcctcctccagtcccctcccaccccacccccaggagcacaatggaacaccaacaggaccctcttcctcagcccttctatgaactacaccccaactgtgttgataaaagtgaaatcccatgaggctcacaggtcttcacagctgcctcagacatctctgttgaccctcactcacatctagatgtctagcggaaagcagctggtgcaatgcacttcagacacgattgtgtaaattcctagcacaccagcagtctttgtacttctttgatgcaatatatcatggctaacattgagttaaaatgaatatcagtggagtggaagtagatggttgttatttatttcacagctcataaactatcttccagcagatttctgccagacccttgccaggcagaggcaaggacccaagcacaagaaacgtaatcatccggaccaaggactgttggcaaatggccttgaatgtttacagcactgtaaggaaggatgtccgtccatctcagtcagacagcgcaagcctatattgtcagttccacatttccatcattttccgtagtgaaacacacacattccttgcaactacttttgtccaataatggaaaactcataatgaagaacgagctcgcaccttttgtcaacaacagaacaaagtgaagtacctgctccgttggtcatgaatcctcggccgtggggacagagcttcttgtaagccactgtgccctcgaaagggcagatctcacagtggggtccccagcctctccctccatcacagcagcactcggacttggtgacggggttcctgttgcttgagccaatctggcacatgttttgcaagacctccgaaaagcagtacccttcccggttgtctggaagagacattccgaggtaaagaggaattgagggactgttctgtgtgcatggggcattaggaatttagtcagatataaaaaccaaaaggatgtaacactttaccctgggtgaagaggagcaagaagcgaaagctggaaacagcagggagagagaaaggaggcgtctgacggaaacaagacaagaaatctgtgagttggcagaaaggcattggtgcagacaagcttataactctttgtgccccagacatgtggaagaacagttgcaacagccatgctatagaaaagggggcaaaaacatacggaagtgggcctggtcgcaaaggccttaaagggcagcaagaaggaaaccccaagctagcaatcccatgtgcaattagcaaaggcagaattttgctgtagggaggtcctgagcccaagatacacttggtcactaagtcatctcccaaggatgactgctttcagctccttcacattttttggcatattctcttatttcaaaccagaaacaatgctttggagtgtgagggaaggttgcagccagtttcagatactcacccaagcactcatcctgagtggggctggctgtgaagccatcgttacactcacaagtgtagctacccagggtgttgaggcaacgcccattctcacagatcccgggcttggtctgacactcattctcatctgtggagacagtgaacaggactcatgagacattgtttaaaaggttgactttttccccttgatctctccctccctccctcccttcttctctttctccttctctcctttcctcctcccctctttccttccttcctttcttccttcacgcactctctcagttttctttgcaaacgagtaatctatctacatggtgaaaagctggaaatcctggaacgaccaggaattaaaaaatcaaggtctccctgtcatctgtattcctcagccaccaaaacactcttccagagtcaacttctgagtccccttccgagagggattgtgcaataaaagcagtctctctctctctctccctcccctctctctctccctctctccctctccctctccctctctttctttgttcttctaaggcaaccttgagcatattttgatatatctaaatgcaaacggcagcattttgggcacacattttttttacttaaattttgccccatctgtatataaagaagattcctgaaaggtgagatcacatactggagggagaactgaaggttgactgtcattttaaagagatacattacttcatcagaatgatgccagtaagttgcgtcgacacagtaacattagtttggactgatcttcagattcaacatgacttgtttgtaacaaagcaatattattgaggaaacaataaaccataatttaacaggtttttaaaacattaaaatatctggattacttttggtgattggttagatctgaatatcacgaactaacttccccagtttctctctcatttgagaatagctttgagtctctagaacacagagctccctgagaggggcagagaatgtggaaacaacacccagagccacatgaagactagttaaaaaccccactgttcagccgaacttgatgggccaggccagaaaccccagctgcccgggaggctatggggcatgaggtgttttaataaaactttattcacaaaagaagtggcaggctagagggttggatttgattggaagctgaagcttgccattccctggcctagggttgtggttctcaacatttgatacacatttggatcacctggggacattcaaaaaagcagcacttggacctacctcaaggaaagcgggggtttcttgaagttagagccctggcttaaaaatagccctagcacaggacgttagtaagacaacggagtccatagagtggtgagggaagtcagtgtgaagatctacctcctggacggctacatgaacaacgggcaagggccaaaggtgggtgaccctggcagcaatacaggccaagagaatagggacaggccagcccagaggagagaacagtaaggcctctccacagtgagttgtgacatttgattaagaggaaggagcacgtcaccaacctgactcagagctcaggtcacttctgccctcggctatttcaatgctgagcggtctgtaccagagacagtcttacctatgcagccctctccatcgggtctgcgctggtacccagggccgcagatgcacatgtaggtaccaatgaggttcttacactccatttgcttctcagtacagtcgtgttttccctctgcacactcatcctcatctggaaagatgtgtaatcacaactttaaaacaagctccactgcaggcttgtcctttaaactatcatctccgtcatcttagcgttgagcttatttccttttgtatgtatggggaattgatatattaaacgtggaagggaatcttctaaccgcctttggacttggtgagaaaactgctttccaataaaccgatgaccttatcagaaacaaagatgctatgggagcccttcctggacttctttgctttatgattcatacttgcttgttgaagcatttataattctgaggactaaatggactaaaatgggccctcacctttacacatcctcctgtcttctcggagaacgtatccaacagggcatttgcattcataggacccgtaggtatttacacagcggaaggcgcagagcagaggattctgggcacattcatttatatctgtagtaagagaacgtaaaagaatgagccaacagcaccaagaatgtcaaaaagagagaaatgtgcttttactaaaagtcaaaagccttccttatcataggcatgggagggatccagaaaattataaaaatgagttgattattttatagctggtataaatatggtggatgtatgctccggatctcccagtacatctctcaagcttgctgtcctggtgtaattatggatttacgtgaatgaggaacaacaggtccactttgcatagttggaagactcaggttgaccagttgccgtttcctttgtacatgaactatagatcatctttgcttcctttaactaaagaagttgtggtcaaaaagaagccaagctctctaatactcttagtaacctctccttccccaaacaaagaggttcctatgagacaacagggattctgggctcaaacagagtgttctggtcattttatacttagagaaactcagtttacacagatgccctctactgggaaaaatgacttttctagagtgcatggtttagaaatgtcaggacatgttttcaaaagcgagagggtgaaaccaaacctcttcgatgatcatgctgtcccccaagaacaacaatgtgtatgaaggacaggactgagcatccaggccagctttgaaccacagccttaaaaggctcacaacactctgaaggtaccaacagtccatatctctgatgaagggatccctttaataccactttcccttcccctcccccattcttttcctacaccagggaaccctatcatgaagagcttgtggatcatctggacagctgctgggctctgcttttagagtttgtgatttagtggtcgaagatgaggccagaaagcttgcatcccaggggaatatgaggcaaatagtcgagggaccaaccactctttggcactccctagtttttctttcttttccatacttccttccaggcagtcacactgacaaatacttttcagatgcctctatgggttaggcaacctctcctttgggattgcctccagatgaccacaggatgtcagtggttatctagctctgtgagcagatgtttctaagaggagagcaggagaatacaaaagaggtgggggaggggagaagagccttggaaacaaaaacaacaaaggaaatagagagtaataagacaggaggtagtaaatgaggagttgtattgagatgtaagcagaaagacacactagtgagcattccgttatatacaatataacttctgccacaagtcacctctattgttttctttatatttcctgaccatatgaggtcacagagaagaatgatgcaacagcctgccatgctcagatgttcttaactctccatgccctgaaaggtatttgatcttaagaactacaatcaaacagctgctcccatggtcagtataggcaactgtctcttctgtatccgagacccttacttaccttcacaagtcatcattgggccaggctcgaacccctcctcacaggtacattcaaaacctccaatcacattcttgcaggtcccatttccacaaggattgcccacagagcattcatcggtatctgccagtgatccaaagtggagataaaatgagtgcagataaaatggagctaaggctctgatatcacttttcattctgtctgagttcttggatctgtgttgtcttgctcagttatcctgttcttgcaaggagggaaacctgctgaccactggtttctagctggagtttgcacttgctcaaaggcagagacagtgagagagatggatgtctagcccttacaccgcccaagtggctttctgcagactgtcctgggagtagatgtcctaatagctaaaataaggctcctatatgcagccaggggtttctgctggctcaaagacaaagtctccagttggtcccacttcacatcactacacaaaaaggcttacatatgatggagttttgccagatataaaatagaaaattacctaagattaaatagaatatactggataaaaaaacccaacattcaagtagattttgttgattctgttaaaaccaggtggtttacattaggcagaaaaagaaaagactagggaaaaaagagagagagagagagagagagagagagagagagagagagagagagagaaaacatgtttaggtcatggtctttctaaacaactgtggagagagaaaatattttaccaaaaaaaaaaatccctaaaaagtatagatgcctcctaacccatccatctggatcgtccactgttcttgtttccggcctcggccttagggagaatattttcccttgggaaagaaagaactctaattttagagataacgttgctattttagatatctgaagccgaggaacacagcaggctctcctcaacggtcactctttctaggagaggagaatccttttgcacatacacagccgcaaactgaagattccaaaacactaacatcgataaaatttgttcctgttaggttactaaatctcacatttagtccagaatactgcgtcttctctgatttaataaaaacaatggtatcattgcagtttagagctgccagggtaattagacacaaaccatttcacttgcatagtagtacccccaaggtgggagaggttgaatatacttatatcccacccttagctcgtgctacagtcctcagaccccctctctttatatgaagacagtactttttaatctgcacacatggacattcagtgttgatcacactgtcacaggaatactttgttagagttcttggacatatttaattctagcatatagtgaaaagaattaagagtaagtggtccacatagaagccatccttagacattttaatggaaaggctaaaataagacactgaataaggtggttggccttccatattaccaaatatacaagatgcataggaaacttggtgtttttacatactgaaagtataaactatgggcactaacagtatattttaattttcactaagacttctgttctgttgtccttttcagtatctcttaggacactcttctgttctgttgtccttttcagtatctcttaggacaagtatctcttgtcctaagagatactgccttccaagttagactacaagggccatgcaaggaaggactatccttgcttggttcactgtagtagctccctacccagcacagggtggggactggctaggagtctaaatgaagaagccctcagtggaggaacagaacatgactcgtaccttggttcagtaaaagccaaatcgctcaatttttgcataaaacaatttcaaaggaagggactgaatcactactcacccacacactcattcccttccagaatataaccaaaaggacactcgcatcgataggagccgtctgtgttaatgcactgcccatgtctacagacatcaggttctttgcattcgtccatatcttaagtggagaaagaaaaaacaataaaaaaccaaggtatttttcttaaactattgtcatgtcagttttcagtaagtgaatatctaatatcacaatacaactaaaatccacatgataagacgtcaaatagaagagattatttctcccaggtagataaggagaaataagacccagaggaaggacaaagaggcagggaagacctagctgggcactcaccaactgctgagtcatcagggcccacaatgatcccacttccaaaggggcagatctggcggaaagcctctgtagtggagagatagactcattagtgggcagatcagagacaatgacagccttcccacgcccccatccactgtgtggctgtggccacgtgctgcacacagtgagagatgcccagaaataaggagacatcaccaagattctcaacgacgtgcctgctctttggatgactctgatttacaacattattaaaagagaaaataactaccatgctcctctggtaaaatatgtttaaatggcattcaagttacacttagaatttgatgactctactgactgtaaggcttacactgttcatggttccatggtcatatgtacacgagatcatgcgatgagaaacagagatgttagacttaccatctggctcagtggggcacaactcacaaggatctccccagccttctcccttcaaagcacagcagcactcctgcttggaatggtttctggatttgggtgatgaacacttcccaccttcaaacttcgcatagcagtagctcattcgcaaatctacaacataaatccacagtacattctagtcgctttcctactgaatcctcattgtctgatagtagatcaatgcgttccctcattaactagaacaatattccaaaagcaattggaagcatgaaagagctgagactgctgaagtcacagacagctggcaagataggaggaacagactcaggttgctttatctttttccttcagtttacctgctacttcaaagcaacctgataggaatagtaaactccaaactttccagccttaatagacttccactaacaatgccaggattggaacatccccagatagagtcattcaggaagaaacgcccgtatgatggcttctcttgtgtgggttttgtacaactttcagcaagcagactaagacaggagagcctcctggttctaagacataccgtcattctgtgtcctatatactctgggaccaaagacaaccccacaccactacataggacaaatgaaggagtggtaagtgtatggactagtcaactgagccaccaggggcattccctgaagtagctatgcatggaattgtggggacaaacttcaagtgggattttctgcagactttatactcatgcacacacagctacagcaaattaagtttccaacgagtctgttcagtgcaatagaaagaggaagcaaaaagaagacggaaggcagggctatggtgggtgtaagcaaaataacccttctttcaaagaatatatgtatttctttatattcattattgctctggaaactccaaggaaaaggtgatatctctcttataaaatgctccagtgttgcttgacataattttggaagccaactgttcccatccttatggagcagagtgggtgactctgagaagtgagctaatgtagggtctggaatgtgttttttcaaacctgacttccagagccaggcattacgtctccttcattaccctgtggctaagctctgcagagctgaggacttgattccacttccgctttgtacccttcctgcttcctgggttctgactacctctgacttctgcattctctactctcagttttccagtccagaaagcacactcccacagcagtgcttgccacccaaatatttactctgtggagaaatgccaagacttaagtaattctcatttcttgggtgacatctttttttttcatttgctttattcttcaagttctttgtcccatccattgttttgcataaacagagttgttttttaccacttattcctacagccatccttaaactgctgaccttactctcgatccagttcaatgttcaatcttccccacactactctctacaccaaaagaaaataaatgtcttggattcagactgagactcaaatgcaaaaagtcccagaggcatctggtgcttcaaaaccccatatcagggcttctgggtaacttccttactttatacccaatagacgcctgattcaatttgacaccctataagaaaaatctctgtctcaaaatttcaggtgccagcagaacctgcactcaataggagatttgctttcagtcatgtgaaacagcacagtgctcacatagctcagtgctcacctcagccagtgttcactagaatgcctgctcaccagttcatctgcgaacagcccttcctgacctctgaaacttctctggaactatggcagtcattttccctgcttgcattcctcagctctggctgagggatgtggcagggttctcacagctgggctgcttcttcctgcaatgtcagcttgccctgtgacaggcctgtgcaaattgaattaatagccttggagtttcctctggcttgccacatggacagattcgcacctggcttctcactgctttctttccgaatgcaggccaagcaagccaaagacacaaatgaagtcaggctctatggggctgacctggagcgcacaggcagattagctacttgaatccagctgtgcctcaatcactaccctgaaacccttgtggtcatctgatagcccctacaagatcaaaccaaccagagaatttgcaacctttcccttcatacttccgcactgatgaactgataaaataaaaccataaccagacagaataatagtaacaagagttcacaggagactcagagacaatagaactgtgtcttgcagttgcctgggtgggtattagtgtggttggggtgagcaaacaggatttctatacccataaatggcttctctggccaaaacttggcaggcctagattccaaagccatattttagaatcttaaattgtattctacacctattatttggtaatatgaagcaaatcacacacacaatgtaaacaaacaactaaaagcacaaagcaacaaatagacacggacagaaatcctaaactaaatatttatgggccttccctaccctgtaattcattaaactcgtttgtataagtatagccaaataacaattgcactgcttgggaatgtctaaacatgtttctgggctttatccaaacattattttgtgcttaccttctgagtcttttaaagtttttttttcttttattttaaagttaacctggcaagcccttgaatattttcaccattgacaggtattcggtttctccaaaggatatgtacagtaaagtgggtggggggggaaacagattatcagtttgcattttctctgtctgaagattttggtttgcacccacatgcatttaagctgcagcttctgaggcaggaacgaacctatatctggtctgctccaggttctgcagtatcagtgactcttggggatgcccgccctcccccccccccccccggagcctctcagcatctgtgcttgtcagagtgatagaggtgtaagtgccaagaaagttgtataagcaactgaaacttgatggatgagtttttaacctcaaaagtcaaaatgaaccttagggcatatggtaatcattagacctgtgggtgaatgaaacatcttcccgttcacaaagactcagagcttcgccatgtttaaaacataagaccataacaaataaacacagaatcatgaaagtccaaagcttccagaggcatttaccttggcaccttcttccagtggaggacagggagaacccctctggacacagacatttgaagctaccctcagtgttgctgcaggtccccaaggcacagatttctggctcttcaacacactcatcaatatctgaaagaattatacacatcagagtcagaatgtcatccagacagcatcggtcactgcacggagacatacagcttcagtggggagttgtttcagtgcctttgcaacagagaagcgactgcccgtgatagaattttgaagtgaagttttaaaagttacttttaacaagtctcgatgtaaaaatggaatctcttagagcctcctacgagttataatgatgaaccactcacacatggaggtgcagggcagtcacagaaatgagccccttacttgagaaggtacagggccaatcagagaagctgtatgacctccacaccacactgaactgggagagaggccagaactccagccccgcacctcaccattgcacaacccgagtccagtgctgacctcaatgaaaggtgatctccctgcactggctgatggagccttcccagcaccccatgcagtagcattcccaataccctactgcggcggctgtaaaggccttactaagcacaatcccatcccagaagatgattctactcttcaagtcagtgcttctgaagagatgaaaatccctttcttgtatagaccagggcttcacttccatcacagagctaataggaactggatacatgtgatttaagacctgctgtcttcagaacatcaatatatcatattgcctgtaaggactgacctactgagaattcagagtagtttggttaaccaaagtattgtgccataagggttttccctagagattcccagcttgtgtatgttggcctgactgtataattaagtattccctttctcgttccaaattatctgtttagggaataaaacatgatcgttctacttttgtgaaaaacagccactcaactgtaacaaactcactcatttcctgtgactttcagctaaaatttatagtgaagaaaggtctttatagtcttaaatctgggctgtattgtcttagttaaaattttcaaagttatgtactaactgcctcttgggtcatgtaactcttttgcttcacatttgtgtagctctgcctacaaagttcatttacatgactttgttcccacttaaggggaagacaagaaaccaacgccagtatcttgccttaccgttgtaactatcatgcaacagataatctagaaataagcaatcaaagtggttattttctcatacaatgcaagctcagcctcctcatctgtgaacttgtagtgtatttgtagtgtattttttttttctttccattttttattaggtatttagctcatttacatttccaatgctataccaaaagtcccccatacccacccacccccactcccctacccacccactccccctttttggccctggcgttcccctgttctggggcatataaagtttgtgtgtccaatgggcctctctttccagtgatggccgactaggccatcttttgatacatatgcagctagagtcaagagctccggggtactggttagttcataatgttgttccacctatagggttgcagatccctttagctccttgggtactttctctagctcctccattgggggccctgtgatccatccaatagctgactgtgagcatccacttctgtgtttgctaggccccggcatagtctcacaagagacagctacatctgggtcctttcgataaaatcttgctagtgtatgcaatggtgtcagcgtttggatgctgattatggggtggatccctggataaggcagtctctacatggtccatcctttcatctcagctccaaactttgtctctgtaactccttccaagggtgttttgttcccacttctaaggaggggtatagtgtccacacttcagtcttcatttttcttgagtttcatgtgtttaggaaattgtatcttatatcttgggtagtgtattttttagttgccttttttgggggcgtttatcagtgagtttgaacttctcttcattgaattatttcattcttagactccttctaccactacatctcacctttcctttaatgctcaaatatttccttttggagactgcttttatggttattatcaatcttttgttattatatacatatatttgcaggtgtatgtgtgtgtttgtaagtgtgagcatgtgtgtgtatatcaaggccagaggttaacattggatggcttcctagattattttccatcttatttattgagacatgtcctctcagttgaacttaaagcatgctggtttggctagtctagcttgctagcttgttccaaggatcccctgtctctacctcccaaatgctggcgttataggagggccaccaaactcacctggtgctgatgtgggcgctagagatctcaactcaggttcttacactcaggccaaccgagccacctctcagcccccacttctctttcttatattaaaatttagcctgtaggcgtcatgttctaaataacaggtacagatattacagaatgggcacattttattgatcatctgtggagttatttttatttctttgtattttgattctatttatttgggggagcttctgtggtaatcatgtattaaaaagtagagaaaactcaagtccagtgtgatgactgaaagacctgtttaaagatagcagtgtgaactatgtgacttcttaggaatccaccgactaattatttatgaagcccttacaacggctattcttcacatagaaatagaaaaggaatctgtgctgagatcaaaggaatggaatgctctatacctcacaacatatttctacctctctattgctgaggacaccatagacaagctatataacccctttcacccaaccttgaacacgggcacttaaagaccttaagtggacatgggagctgtttttagctgtcaacaatggccatttaaaaccatgtagtccaggaagaccatcagtgggactggaaattgtgctgaatcagagcgccatggaaagagctagggccaccagagcagcctgtgcacagagaaaaccaaagctcccagtgaccaggacagggactggcttttcctgcctcgacagagtgtgaggtcataagccatattctgtgagttaattgtaaacaaacaaacaaacaaacaaaaaatgtctgatttcagagcttctagtcaatgctcagccccaccggcagccctcaccttcacacttgtcattctgtagactatacccaggcgggcaaatgcatctgtaggagccatccaggttctgacaggttccaggtgcacatttcccaggatccagaacacactcgttgatatctgcagggacaaggaaatgagagagaggtccctgttggcatggtcgccatcgagcagtgcaaactcaatcaaaggcactggaatcaaaccgtagaagcccacagggcttgctaaaagtcacaagtcttccaaagaggaaagcaaaggcattactgtaaaagcttcccaaaggacgcaatgcaaccacatcttagtctacctgccataaatagagtattccaagaaaagtgttctgcaggacaggggttctaaagacacttaaaagattaaacaaagtcacctttggaggggtgttttgagcaaaatataataaatcagagctattaagtttaacatttaacagttaaaatgttttctatgagtataacctaatttttaaactaagaaggaaaatgactatctgtatacattaaaaaaaaataacagtgaggttagaatgcattctgtgtgattctgtgctaggcctctggggacattttctcagggcccgttttccttcctttttctttaatttgaggactttcataagtacactgcgtttgcatacatttcaccgtcctccctccaactcctccccatgtctccccaacacccctcttgaattcatgacttctatatttatttttacgctacacacacacacacacacacacacacacacacacacacaaacacacacacacacacccctaagctaacgtgcacgagttacagcagaccccttaggattggcccgtccctctcaagatgttagggtctttctgagctcctcactcacccacacaggtcctgccgtccggagccacctcatagccttcattgcacctgcactgaaaggagcccacggtattgacacactggccatttctgcaaaggttcccgtttccagttgcacactcatcaacatctgaaaaacaacatctccattacggtccaaagaaaatgtcaaactccctgccatccttctgatcttcggtggcctttgtggccttggccaaatacaagaaactgcaatgaaggtctggtttcagccacagacccagctggaggcacccatccaaatataatgaaaagattatattatcatattaacgctggtaatttgcatgataaatttgtagcagttttgcttagactttgtaaatttttttcctttttgcatttattactcaaaaaatttaattagtatacacaggattaagtttcatcatggaattttcaaacaaaattgattttatgtagattttttttgctctaccccctggctccctgtagcctctgttcacccccagacctctgtttgcttttattgctaatacattcctctaccatctccatgcttcttcacccccatctttttggtctcttaattttagatttgttttgttttgtttttgtttttttgagatagggtttctctgtatagccctggctgtcctgcaacccactctgtagactaggctggcctcgaactcagaaatccgcctgcctctgcctcccaagtgctgggattaaaggcatgagccaccactgcccaactagatttgaattttaaaagataaaactgatttactggatacataattcagatgaagtcatactatagtattgcaactagaagtatttaaaattagcttctaattctatgtggtatttgattcgttattacttcttaggattccttctctatattatttcttcgtttaaagtcacgggttttcatgcatacacccttgcatcttgctcacattcacattcctagtatcctaccctcccagtggtcccttcttcatcccaaacattcttccttctgcttcacacgtatgtatgtcttatatagtacatacatgtcacatgtatgtgtacttatatagtacatacatgtcacacgtatgtatgtcttatatagtacatacaaaaagctaatctagattctgcacctgagagaaaatgcctatcgtgtcttataagggggatgctatacacttaataacttgtttgtttgaagagagggtgtagcgaaagatctaagcaaggctcctacactccttctggattgtacaatttacaaagacttgcttttgtatattttaacctatcttgaaatttatttaacttaaaatagatatagaaatcatagctgctgatacacagatcaataaagttaacagagttactaaaattgacttttaatcaacatggtatacttgatagtcacgtgaccaactgttaggcagaagattggatgctggccataggcagaagattggatgctggccatgatgcagatgcgtgacgtggcgacctcctgcatactcacctatgcagtcattgttgtgagacagtatgaagccatggttacagcgacagttgaaggagccaatcgtgtttctgcaagtcccgttcccacaggcgtctctctcacactcatttatgtctaggaggaagaaaggccagagagggagacacaatgactaaacaggaaagtggttacgtggtcactgatgctgaagggcagttgtggctgcacagactcttccaggaggctggaatgttctgcctgatgtcaccagcctggggaagctgaggtgaggacctacatcttggaagtcccaagtttcctcagttggcgtgtgagaggaggcgagacgaggacacaaggactggacaagacttttattctatttgcttctcaaattctccacccttgccactttgctcaaatattttcacttgaaaatggaaaaacttcagtgtgcatctggaccttcccttggcggatgttggcacactttggcttacaggattcatgttccattttaccccaaggtcgcgagtcagcaggatctctgcaaacaacaacagagctcccctccccagctaagctgccacttgggacacggctccttcctcccaccagtgataactcagctacccttctgaacacacccaagggataagatggtactcaagccaggcagtcgtgggacacgcctttaatcccagcacttgggaggcaggggcaggcggatttctgggttcgaggccagtctggtctacaaagtgagttccaggacagccagggctacacagagaaactctgtctcgaaaaaccaaacaccaaaccaaaccaaaacaaaaaagatggtactcaatttggcttggctcagacgccctggcattgcttgcctttttatttactggcccatgacttttggcttttgcattatgatgcttattctggcaacttacatagttttgcattttaccaaagcagttagcacctttcttacatgctatattatgggggagtagaaaagagaacattggtaccattggcttgaagagggagggcagatgggccaaggacaaggggagagaacgaatggaaagagacacctggggagctcaaaatgtagtggccaaagtcaagattgcctctttcaactttgggacatgatttgtgattcagatggaaaagttattgctagctctccagtgccttgaatgcggagtaagcatcacatccaaataatgagtcactgtcactcttcaggccacttgagagttaggaaggcaagcgagtctgtcgtgctcatccagagccaagagagggagattgagaaacaatgaggcagattcttgtggcgatgcaaggaagggcgagccaccctgggatgagccaggatgattaaggaggagattaagcatcgttcatgggaggacctagttatagccaaaggcaagggctttaagcaggctctggacactgttcttctgatatgtttgattcatgggcttaaagaccctcaaaggcctaatgcatgcaaccttaagtcagaaagaaaggactgttagatgtttgtgaagcactccaatagtaccaaaaagtggatcaatgtgcacactctgaaccccggactggatgtgcacactttcactcatggaccaatgcacacccacccacccatggactgatgcacacacactcacccatggactgatgcacacacactcacccatggactgatgaccacatactcacctaagcacatggtctgatccacatttgttttgaagccagtgtgacaaaggcagtagaagcttcccacggtgtcgatgcactggccatgactgcatatgttcgggatttcttggcactcgtttcgatctgtaaaccagaagtgtcttaggtgggacactgcacatttgcatgttttcttagatggagacttagagcataaaacgactgaacaaattatctccaggccttgctctcagagataatcctaacccgaaactgaggtagtgaagtagacactggcattctctctagtttttcctttgaaattggccagatcttactctcggagcattagtaccaggcgaaccaaaaggagacagctccttctgccaaaggtatcttgaaagaggaaagtaaaactcagaatatggagaagtactttctacagcgcctaaacagcttcacatggaattgatatctctaggttttggtaccaaagattatgggcaaagactttggggcttctttggaaaaattgatagtaaagtcaaacctatcatgagtatactgaaatgggacactaccataaatgcatagatgctcacagtgggacactaccgtaaatgcatagatgctcacagtgggacactaccgtaaatgcatagatgctcacagtgggacactaccgtaaatgcatagatgctcagagttggccttactcctttgcctcattacttcagctttcattccacctagtttagttggaaagtcaggctgcttattttctgggtctacagaactgttacctcagagcaacatggcctaactgtggcagagatgatggctatctccagtcagaagccatcaattgagacattgtttataagtctcaagtgtaggaggggttggggttacactgcccctaaactgtggctagtctatatagaaaacagttaacaaataccactattctcgtttgagaaaatatttaaaatgaagaatgggtgggcaaagaaaagggatttttattttttatgatcataaaagggagcttcccttgagaaaggtcagtcaccatctaactgtctaagagacaggtttttagttcccaggagagcatgtctgaggtttcctgggaggttttgaatagggacaggatcccaaacagagagaggggcgatcatcagacagcggctggggatgtagctgggaaaggcatttctacagggataggatttgctactgaggtcagactggcaacttgagcaccaccatcaacagcaatgtggagctaggaccactgtgatttggagttttgtatgaatttaaattcaaatctcataggacgatattttcgttttaaatacaggcagagaggaatgctttgcaatctgtttgaaaactaccaggataagacaagtgcttaaaatggtttaaaatagttctaaggtaggatggcagcctggcatggtagccaccaactgttatctcagcactcgggagctgagacaggggagtgtgaacttgagccagcctgagctaaagaggaaaaagatcctgtctcaaaaatcagcaacaaaagtgagatgggaacaaagtgatttctaggataaaataccaggttttccctgaccgtaccagatgcagcttaggttaacattctataagaaaacgcagaaggacctgagctgtagcaggttgtagctgattgccttttgctgatctataaatggcccaacttagtggccagagcaaatggtctacaatggcacacccagggcgaccagccagactttattttaactggccacctttcacccagctccaaagaaataaaacttgaaaataaaatgcagggaagtggcgttcaaggccaatgtcaccgggggagattgtgcttcatatctgccagggactcatttttcctgttctatatccttacctttgggataatctcagctctgttgatggaatgctaaatactcacacatgctcccttaaactcaacaaaacaaatcttggttggcaaagtgattttttttttgttctgttcttataccctcttcctaccaaggtttcattaaacaatggaaaatatcctgcagagggcagcacacttcctaccacttaatcacagttggccaacagagccaaggcaaacccgagcacggttcctctcgtgttgtttcattcacaagtgcacaaaaacccaggaaactcacttgaaagtgaaccctgagcagggtgacacactcttaaatgtacaatgtaactgtactgaagtgtaggtgagggcccatccgaagtattagtttgcctctgagctctaacacaagggactttattttcatgccactagctagagaaacccttagatgttgaccaaatgtatggccaatgtgagtggacaatgtactctcttctttataccacatcctgacaaagtgggcagcagacatccctaacctctgcttgctgtaggtagtgcagaggtaatgagacggtcaagatttgcttatttactgtcttcccgggggtcattctcatcagtaagatgtttgggaagacaagggtggtgtgtgtgtgtgtgtgtgtatcttttaaattcatttatgcaggaagatctgctccaactcaagtaaaggcatctagcacaatagaagatatgatgaaagccttccctgtctacattatgcagaagctaataataatgatcctcttcctccccttctttttcctcctcctcttcctccttctcctcctcctcctccccttcttcttcctcctcctcctcctcctcctcctcctcctcctcctcctcctcctcatgaataccgattagaggactgtgggcttgtacatgtgggtaatgggaatttcttggtagggtagggatagagagactcatttgtgtaaatgacttcttttttgctttgtggatatttcatttataaggaaggcaaaaagctaagcatttagctattttaacaattttcctcctttttcctctttaaatacatctagtttttcaacctacatcctcacttctattccttagccttagaatctataaaaacgtgcagagtcaggatcgtgacagcaatggcctctgagtgggtgctacataccgttgcattgacctgtggaggtaaggcggtagccgggcttacagtcacagcggtagctgcctgcagtgttgatgcattccgcatttcgctggcacacagggccattctgacactcgtcgatatctgcaagcagaagagagtttatttcaaggaagaatagagtctggtgttgagttggcgatacataatgttcttatgatggctcaatcatttgaaaagacagcaatgggtatttataccagatttactcacagtggcaagatctcgaaagaagccaagctaatcctcagtaggtgagcgcatcatgaatgcactgtggtatattaagatggaagaatatagatcaatattctagtgagctggctagctacaggaagacatgggagaaacccacatgtggattcatatgcgaaagaagccatctgaaaaggctctataatattctgatttcaatatctgaatttctggaacaggcaaaactatgggaccagtaaagagattcatgatctccagggctcagatcgggtctggagatggtggggaagggcaggtagataaacccagagaagctttaaggcagagaaactatgatacaatcatagtagatatacatcactataaagtcatagtagatatatttgtcactataaatttgtcccatcactgggaagtgcaataccagtggtggatcctattccctaggagatgaggcacatacggctcaggaagggaagagcttggaagactcagaaagtctcaaggtagaaaggcacaaacagtgcctgggaagaggagactctggctaacggccagccaagctgccggcaagttgttcaggaagcagctttcatgaactgtctgccatgttggggtatggtaggcttttggtgacatagctgcccatggccatccatgctcctgtatggaaccactcacccatactcctatacataactcagtagacttcctggtccactaaacaggactacagaagaactgcatccttggtccgctgtcagtgccctatccggagtgaagagatgtttgttcagagttccccaggaaaagccacaacagaattacatcaggcctgtgcttgtgtgatgagaaaacctgaacgcagcttggtggagcttccaggaccgggagtgtctgtctgagacggggtggactacacctttctgtgcagtagattcatgagcagcatgccagtgtcgtgaaagacacagcctcaactcacccaccagttctgccctgcttgtaaactgtaaagaaacagagccaaccatgccacattagaagccaagtggtgtgacaggcaggcacttctgtgacacgagcaactaacatctgctcatgcacttccttgtggaaagcataaatatggaagtcccccgaaacattcctggaatccactccaatttcagaatagctgagccacgcatgaagtctaccttcattttctgatttattttgacagctaagaatgtgttgggaagcagctgagtgtatttaaacactcaccttgaagaggagtaatttgtgaaatggaaaccaaaaatcggagcacttagtcttcttaatgttctctgagtatgactgtttctcgacacctttatgagcagatagagtgggcggagcctgctgggtcttccccgacagcagggcaccttgcctggcccaacaggctttcagtcccatgtatgctgcaaggtctgggatgactttgtactcatgggtggccttgcctatgtgtcctggccaagggcagcatttttggcaactataagtagcaaaggggtatttgggtaggtatccaaggggctgacaaatagaagggaaaatacaaggaaaaaaagtagcaggcattctgagacatgtaccagaaggggaagagtatagtcacaaggaagacagccacctctagcatgctaagttctgctgtcccctgttcttcctgaagcagtgccttttctgcaggaaccgattcttgatggttcctggaaaccccacagctgggctgtggtctgaactggctatctctttaaagagtcttggactggctatcacccctgcccacaacccacacaacaagcaaggcaagtggtgcgtgcccagttggccacagtggttgaaagctggcaagagagcccagcaagtacgtggttactaatggaacataactctacatgtggatcataaacagtccctaatttagaaaaagaaggtttgttaatgtcaaaatattgacatgtgtgccataacccatgctccaaggggggtgacagccctttctataatgtgtaaaatttggctagaggcccaccactcaagcagtaagcagaaactgactccagttgttctagagaacatgccgtatttagtttgcagcaatgcctcttccactaaaatgtaaaaggatgctatcttccccatacgggaaaagtgtggagtgtcacagcaaacactgggcctcacaggctgcacacacggcaacgggaggccattggaagtccatgtgtatgcaagccaatgtttcccatatcaaatcggttggttcttgccatttagaattctctcgtgcatttggaatattggttttaccattgtttccattggggagaagcagagtctctggaagagaacaccgactttgacatttagttaaaaatgactgtcctcttgtgtttgtttaggagaggatgaagcaaaagcactctatttgatacacccagaacctcaaaggtcttccctatcagctgggaatctgatatatatcttgtgttggggaagacgttctagaatgaacagtgtggctttcccactgggaatccatgaaaaggaaaaaagagaaaactcatgtgggtctctaccacgtgcttctcttaatcagttaatttttaaaatgatatttttttgtcaactccagtaggctttcccacagtgtatttttctgttctgactcttgagctggggttccagtgttgtagaattgtgggagaatgtgtcaagggtgttaagcagcttgcgagttgcttcatttgtagctggggtacagtcacacttaccttcacaaaccagtaacttgtcgttatagaagaatcccacgggacactcacaccggaagctgccaaccatgttgatgcacactccattttcacagaccccagggatctcccggcattcatcaatatctaaagacagagaagccccttgtgagcggcagtgtggtccatgatcccatgcaggctgagacaggattagaaagatgggcactcatgtgtctatgtggagtccatatcttttgggttgagttttattgcgaaacatccaattagtaaggtagggaccacttttgaatctacagaacaacatatacaccagatgaatacgagctgactgaaaatatggtctgctcagaggaaggctgttgtaatagactgtttcctagggccagagggttgggcttgcctgcttctcttggatggcccctctacttgcttgccagaccatgtccattgggcagacatgtacagtatgggctacactcacgagtgtctagccctgaggcttctgcctttctacagaagcacttgtttccttacaatcaggaggctctgcaggatattttcttgcctatgatgtagctctgggctaaggtagggtttataagatcagcagaaactgcagaagagcacaccctgaaacaacaacctgtctgtccaaggcccatttccaagagtttgattttgtttgaaagcaaactgatcaccttaatggaaaacacagcttagtttctgcaagggagatacaggcggtgaaactggaaaggggatcacaggagagaaggagctcaagggaggagggaggtaagaaagcaggagtgaggctgactggaggaggaagggaactagccaaggggcagcgggggtggggtgtaggggaggggaaagggcaagaggcaccattgtacttgtgtatgggaaatgttatgataaagcccatggctttacatgttaacctaaaaaaaaaaaaacaattaaaaaatctctaagggtatactttcataacatcactattttgaatacaggtaattttgacttttggcactaatgttaaatagccatgtgaggtaaatcacaattacattttatctgcaaacgaaaatcaatttagaatcactcttttagtatagagtaaagcatgaaacagggccacacacatttgttagttctaaatagaaatgatgtgttattacccagcttagcaaaaacagactgagtcaaatccccagtcacttctaggacaacatgacaaagggatattattaaatgttttctttttcttttcctgtcttgatttgatttccacttggagacgttcatattttagggtgagattaataaacatgctatatggttttagtcacacaggaatgggctctagatgccaacagttctaagacttttcagaggaaggctataagctcaaatagaataagcctttattttgtcatgacagaatttggtaacactaagtacattggtgaataccatgtttctagttgcccagaactagaagccaagaaaactgtgagtcaggactgggttctggttccagctctggtactgattagctaggtggccttgggtgagtcccttcccttttctgggcctctgtctcctccactggaaagcaaggaagttggacggggaggctggaggtcttcccaggtctgctggtggatggcgctaatgccatttcaagtctttgctgattgccaactgtgggggccaggtctcgctgggttacatgcctggactgcccatggagacccattaccattagaggccacttaactcccaatcacagattctagacagattaaaagatgtttgggaaggagaaaaacagagcagcaaaggccaggtgttccatgccaatgtcatttagcagtttttctttccagaccatgaagtttctttggatgttgactggcctgtggagccgtatggatttggcactaagaaagcctgctgattgctggaccaggcccttgttttcttaaacaaggtcactggaaaggctgatgtggatttcagttttacttactaggaataaagcaagacaaagcaagccgtggtgtctgctaccagacacagtctcagaggcttagggggcatctaaggatggctataaatcacaccacaaggaggatactttgagaccgcatcagcttccacggactttggtggtatttgcttctaaaccacaagggcactgtctatgctggctaacttttgtgcaacgctcctcaatccatggcacttctgaatctagtacaagctactaccccaccacagggtcggcttaagctccacatgagacctcatactgaaaaggcttttatagccatgaaattctctaagcaagggacccaaagagaggccaagagagatagagttaataagcaagggggctttggttaaccaatcttcataaaagaactgaaaagtcatgttacacttaaaaatcaggtaattaacatcaaatgcaatgtcagctggccctggcctccctttgtggacacctagggccggattctctaagcttgatggttacttcttgaaaagcttcccagaccccttagtcatgagcagtaaagacatctatctgtccgttgggtggtgctacaaagggcttcacactgtttcaaatgaagactcactacttgaaaacagcttgaggcctcattagcattctttccttctcagaaaaggaaaaagcaaaccaaggaaaaccatggtgtgtgtgcaccccacttttaacacagatgcagaagcagaggactccccctaaccatgctcacgaggacacaggctccaactcacccacgggtaaacccgtataaatgtcaatcacgaagccgggcctctggctcccacagagggtagcaaactcatctgcaagagttaaacaaagacggcataagggtcaggaatgagcgagaatgcacccacagaggaaaaaactgactaaaacatttattaaaatgtatccattagaaaacactgcagatgtaacattgcctgtaacacagacactgaaggaaaatggccttccagctgacaacgagggagagccaggtttccctgtcctccaccctggtggctgtgtctgactttcatgtggatccaacttgcccactcagatctttgcagctgcgtggcaaacgattttgaacacagagccttctccctggcccaagactagatttaaattttttttaaaaaagttcatctatttatcatattcacttctctgatgtttccagtgttttaattatgtggtgggaactctgaagtaatgctagcaatgtttattcttttgtgacatgttgaatttactggtctggttacaactttggatataaattaggaaatatactactcttgtcacttggttttccagcaggaaggaccaaaggcaactgaaaggtaaatgctcaccttggtaggtcaagttttctctctgaaactaaagaacacaccttttctctttttattaggactcatttttctctagcaattttttctagctgatagatctaccatggtaggcaggaagcgaactgtcacctgtgcttgggatggggcactgttcacagggtttgttccaggctctgccgatgttgtaggagcaacagcacatcttcttggtcatgttgaacaggagttctccatcgcaggtctggttgtcagcgtaatagtttctgtagcatagacttcttctcatgtctagaagagaggagagcaaaggacctggtgatcccatgggatctccacagcccagcagagcacaataggagactcaaaaggcaagggtaatccagctatgataagagtagaaaactgtcgtgcacccaacttctcagctacccatgccgctataagtgccatacaagcgaggcacttggagaaaaggactcccgccgttctgtgccacaggatgaggtcattacgaagtgcagcattagcaaactttacacggccctccacccgctctcctcgtaacaatcctccactgctatttggcagggagtctcttatttctgattcaggatattttaatgctgtaggtcagtgctgtaatataattgtaaaaagacacacctataagtcaaacgaaagaagtactattaaactggcatcttccaacctcacattttaaagaacaccctcaactgccccgtgccacacacgcagcgataaaaatgccaaatctacaggttacatgagcatgttggaggcgggctgtatctcactacaacagttcaaaggaggcaatcactctgcagaacagcaaacaccagttgtttgactggcctttgcaggcgagagccacgcccacatgcttgagggacactcggactcacccatgcaattatttcccccgttcacttgcatgtagtctggaggacaaatgcaggtatagttgccaacggtgttgtaacaggtccccggaccacagattccaggagtctcacattcgttcacatctataatccaaaggagaaagtgttacacgaccatggaaacagtgttctggaacaggaggacattctgtgttagtgctaatgttgacagcaagaagcaaagcttctacccagaggacctaaaacccagatatgaacagcaggtcctcagcctgtggacatctcttctctaggttaaatttcaagaaggttttcaaagcagctcatgccttctgatatgaacgcttaaaaaaagtcctcagtgttccccaaaacactgagagatggaaatggggtaaaatcatagctgtcaaatatacctcagaaagataatgacatagttcatatgttcatagatataatctagactgcagccagcagcaaccggcaacaagacagatcacaggaatatttgttaaccatgagtctgagcgctaagtcttatacaccataatgttcaaataattcttatggaagaggtctcttccctaactggtccttcgaatcctggatgtagatggagtctcctcactccctatcccctaccacagtccttgggctaattgtcctcaaattgaaaaatggtccaaaattctccatctttaagaaaggcaaatgaggccattggctatatcataaagacaaagggaggctctaagagatgctcatctgaacacacttgtacaggtgacaagcggctaaggacaagaggaaacacctagaactaccctggacacagagagaggatgcatgctagtccagtgaacacggatttttttgaagaacatggtttagcttgtttggcctatgaagccatgttgttgagctcagttggtaactgggggggcaggggagctgctcagacctcagtatttgaggtaacatatcttgcgtgcaatctcttaccatcacacactcgagtgtcttcattcaggtagtaaccagttggacagcgacactggaagctgccaaaggtattgatgcacttccccccttggcacagccctggaagctcctggcactcatcgatgtctgtaagaatgaaaacaacgcatgccttcaggacttgaatgaaactgagggcatccaaaaggtgttcgtgttaagacaaaggagaagcccttaccttccaatataacggtgatgggatttggacgaaaaccttctcctccagggcaaagaattttatactcagctattgaaacaagaagttccacgtgagttcctttgaatctagaacttctaaaataatatcttcagaagaaatgctgacacatatgactgaaagtgttaactttccagaatcttcagctcttatttacccatttaaagcaatcaaacatctatctatcttagcatgcatgggccattccccaaacataaggccactgcactgatctcagaaacccacagctattctggtcgtgtattcttgtaaaatattttattctctattatctatcactgcctattaagaaataattcttctccatttttgtttcctgccaacttcactccattttagttgtatttagtattctttcctgggtgtccccatctgccctaataatgaccatcagcgtgtctctaaagctctttccaaagagtgcaggagattctttgctcttgttttcaaccttctgctattcttaatgtttagatattttttactcctctgtgtcacacatgtgatgctaatatcttgatttccctccaagtctaatttttttccagcatcttataacttctccatcaagcaataaggatttacataataatttcttccagtgttatgcctcagaatgcaaatgaagtgacccacccataatatcatcctgaagagcatgagacttgttctttcatgattatcaaagccttgctgtgcctggcccttgccctggctttataaaagcacgtggattcagatatgttcaaattcccattctagtttgaaatgatgacttcttgctaatcattattattctataaagctgaattccatatttccaaatcctaatctgggtttgccctcttgatatcaatggcactgggtgtcttcttccttacttctattttgctcctccctcgggtgtcttcttacttacatcatgttcttcttcaatgcatagctcaaaagttcgcaaagtggtcagcccccacctttacctgtaactaaaccctctctctctctgaagaggaaagagaagcttgtgccagccaggctgtgctgggtgaaatattctaagacactcgtctggccaagatcacacaaccaccactcaaagagtcccaacttgaacctagtgtcgatggatccttgatccattttctgtcaaatgtgactccaagcctcctcttcttcctctgtggtgaggcctgtgctgagttagagttcttttgtctgtgctccattctacctaatggctgtgcattcttagagggcagaacgctggctttctactctcaacttatttgacaaatatttcgagaagtaaataaatgaccatcctccaagaaacgaaccaacgttcatcccaatataccctataagcagcaggcactgacttcggccagactggccactcctggcttaaatcaaagtgtacaagacaaaagcccttttttaaaggaggtgtgttctttacatccttcaagttgaattctggaaatcccattcacatacacttgaaaaccttgccctggaaatagtgaagtattctaacttcttactaggacagaagacacttcctgatgtacataaactttcagggcaagtcagagaaccttttggactcacacatactggactgacaggattaatctgcctttcctatcctacacatgaagacagtagtggcttcacctttatggatctagagagaactggactgaaacagagcagtagatatatgtagtagtagttgtagtagtagtaagatggaggatgtctacttacatgtgttcacagaaggacacagctcacatggggttccccaagctttacccagtgaacaacagcaggaagccttagagacaccaactccaatttcattgctgcaggctgtatctccattgtctccccggggtcggatatccagatagcagtttccagagcgagtatctatcatacacaaataaaaaagtgtcaggcaaattcttcctgttagagggataagaggggctaagagtcaaacttgtttctcaaagtattttttttaaatcttaatttaaatgtacttaagaagctgaaagtgtctaagaatatatattgatcattttccttcagaaaagaaagctcaaagcatacaatgtgtctgagaaatatttacatttttatgctattacttttgaaagcataagaaatggaatattcagtgatggttttaaaataacaaacagtaggtgtctggcgaaactttgaaggatcttaccgacacagccgacacgagttggattcagctcaaaatccggaggacaatcgcatgtgtaactaccgggagtgttgacacagtttccactgatgcaggtggtgggatccagacactcattaacatctacagccaaaaaaaaaaaaatgggcagaattacccagcatcccgcgtggaatgacatcaccaatggcagtagcagctagttcagggttcctaacaagaactaatcaattcctccattatgcctagtgatgcaaccttccacctctgaaaggcacctccccagcagggaactgtgtcatatagcctttgctccaacccccacccctgaacacgtttaccctttgaatttgtcatcagaataaaatgtaactttgaagctaagaaagatattccaggccaggtaactaatggcaaaacattgttttgaccttggtcaaccaaaatttcagatataggtttataagaacaatttaatatgtgtggcatgctattttgtcaaattagagtaagatgccccacagaacacttgggagcagatggtctctgctgtcttttctgcacacacatgtgggaggcttagtgtttcttcaagctcataaagagtccctccctgcccagatgctgggctcaacagttatttctcttttggcatccattccaaaacgatgtacaacattccagaggtttaggacatggattttttgacaaattctaaccctgtacaaccctctactctatttttaatgcttaagaaataccccaaactagataaatggctttggagtagccagcctagggaattgggatgcttgtcctggggtgttccctatggtctgaaaatgccgatatcctccaggatgagacctactttctctgtatcttgagtaggagggtggtctaagagagaaacttgccatgactgtcagccttttcttggtgccaaagagagctatgtggcagtctgctgggagctataatttttctaattttttttcttgtgttccctgggagtccttttcgctacaaaaaatagactcctgtattaaatggaactaagaagatgggtcagtggggcaaaatatttgcaaacatgagggcacaacttgagatcttctgcacccatataatcctaggagtaggaggaaggagaaacaggaagatctcagaactcttgccagccaacccagccaatcagtgagctccaggttcaaggaaacaccgagtctcagcaaatgaagtgaacagcagcagaggaagacactagaaacttgactcttggcctctacatacattagcacagacacctaacatctacttgtacccccaaccactgccacacacaaaataaatgcacgggcagcccctatgtatcaagcactctgatactcaggtcagaacctgagcatggatggaaaggtgtgggtactgcatcggaagggtacaaggagcaaactggaggttccagggcagggcctttgaaaggaggttctgaggatgtatttaagcagagaaggaaatggaaggaagccatacagctagagcaccccagaaacttctctctggagcgacaagctcaagcccaaacacacagacatgtcccctgcctttgtatactcacctctcctcagttccaggcctgagaaatgaacccttgactcttaatgccttactcttcctttgctttcctctgtagcttgtgtgatcctggtgatgcccaagcaacagcatccctagggatacctgggagcccatcttaacatccgtgataccttacctgtgcagtttccaccacttcggtccagttcatagccaatctcacactcgcaacggaagaggcccgggaggttgtggcaagttccaaagacacagatgtttggaagggagcactcatcgatatcttggggaaggattacaaaaagagacaattttattttattttattaaatttctactgaataagccacccaataaaattaggcaatggatatcagcattaagaaaattcagtatgcctgacatcaacgtaggcagcttcttagactttcaggggatttgtctgtacacagaagccttgctagtgacaggctctgtttcctggggcccatcacatgctaagccataggctggacattttctaggcggccatcaatcttctttgtggtatttgatataggtttaccttactgttgtaatcaggagccaaacagaacaagataggctaaactcttgtgttgctcttatctgtatattctccaattttggtggagaactaacatttttagatcctttgggagcagctttaaagttcactaatatcttctgtcctagttctacgatgcatgcctgctgaggtccacaagagacctacacaccgcagagcgaagtgttctgcttgtgtgatgaatagacacgttttattttcagactggagactgctttaactaggcatgaccactctgtcggtgatagtttatactaagaacaaacaaacaaacaaaaccttcctgtaaattttaagagaagcaacatttgccccatgactgtcaccataggtgacacagtacctgtttcccctgggtttagggtacagaagcaaacaaggcactaggctcatgagcaaggcctcagaagttttgcgtcagtgctgcatttctaacatgaacaggataaaggacccccaagggctccataagtgaggaaaatacagaaatgagtatgtagggcatagcggaagaggagtctgagttcatatccatttaataaggaactgctattggctaatgcacaaattggggccttgcctcaacttctgtcagccctcatcatttgtttatctctcctgaaatcatctcagctcactgaaatccccaattactttcaatgaagacagtgtacttagagttgacaagtgtgagtaaggagaagaatctggtgtttcctaactggatccatcctgagtcaccgggttcccaggacgcttcctgtctgaccagtacttcccagaaagacagaacttgaagctgagagaccaaagcaagtggaaccattccagggaattctcctccagggacatggcaaatcccgctctgtgtctacatgtgtgagatatttagagaatgttctaagatatacttaggacgttactccacacaaggagcaaactctctgcggctattatctggaatccttgacttctagaaaccaaagcctggcagaaattaacagccgtgcttctgtatttatagacaaccctcaaacagagcaccaggggatctgtcctttgagatcccccgccctccagaagtaggagtaaccgaattgcattagatgaagtatacatggtcacttgttgtctcttttgtcctatggtgtaacagtgcaaatcacttggcccagattttctctgcataaacaggagtggtctgcctaaaggtattgtaaccttatactagttccttgtcctggtgtgacaaaattcccccaacagtagcaaagtcaagagtgtttcttttagatcatgcatgctcccggcaggaaagccctgccaggctgcagcaggaacatgaggcagctttatgtattatgtccacagttgggaagcagacaatggtgaatgctaacgttcagcttggtttctcttattttatcgaatccaggagctgagcatataataaggtgctatgcagagttaggatgactctagttcagttaacctaatttagatgctccctcaaggcacgcctggaggcttgactctaggtgtttctagatcctctgtagttgacaataccatcatacagctctgccaacttaaccaacgcttaaatgtgaagacaagacacacttcaggtttaaagtaggaaaaatccagtgatgtgtgaacaaccaagtctcacggcttccccatgcttaccttcacaggccttcccgtcagcactgggcacgaagcccatgtcgcattcacagcggtacccgccaggggcgttgaggcactggccattgccacagaggttcaggttctcggagcactcgtcgaggtctgcagacagaaacacaggctatgcttttgcagtcaagcgatttccaatgccccaggtgctgtaatttttctaactgccaagtccatctgcactgcatcataatccccgtttgataaatttaaacccactggttttctttttggccaatattgaatatgcagcagtatttgggtacagattcagaactctgaatgctaaatcgcttctagtgctgcaatgtgaatattaagtcaaactcattattcagacagatcttttcacccacagaggggacatgtttgagacctgaaagaacatgtcacagagtgtgcccatatctcaggcttcacgctcagctcaaagaggtaacagaggaaatggagcactaagtcacaaacattaaattctgagcatatgaagcactgatgcctaatgagtgtaattcaaatattttttccatgggaataaggacagcttattattaatttcataatgccagagagaaattagtgcttgttgattcatttaattaatttaggtcgatgatccaagtcacatgggtgacttaaaagcatgggtgacgtagtcatactactttatggccaatgtccttgacacaagaagtactgtctttgtggatatgcacgtgcacaatgcagtcgcatagccatgcaatcatacatatttaagttcccattgcaagtttaggcttattctgtgacttttagttagaagtaggaagacagataattttgtgagtatatcataaagtgagagaaagccttacagagcagttctgaactgttgttctgctaatacagtgatgggaatgatgtggtgagagcctgtattgtttcctcatacagaacaccacattgctggccttatgtatcttcctagagcaagcttatccttgggttggttagggatggcaaggcagcagtgagaaacaggtatggatacacaaaggagaacacatataaaaggtgacatgacctgctttagaatagtgatgccattatatgaattgacatatgtgcatacaaatgtatatgagtagatgtatgtatgtacatgtatatataaatatatatatatgtgtgtgtgtgtgtgtgtgtgtgtgtgtgtgtgtgtgtgttggcttttgaggtctctctccttggtgacttgcctccaaggttttagattccacgggaatctaaattcagataagtaatattttctgttacttgaccggcatgccccagtcttcaagaagaattgttggtctgatatgggttagtgtgcttttccaacaagagttacatggctgtttccaaagtaagcctacctgtacaggtgaagccatcccctgtatagccatccttacagagacagcgatatgaccccatggtgttcttgcagtccgcgtgttggctgcacatgtgggttccattagagcattcatccagatcttaaagaacaaagtttaaatcattatcaacatcatgatatttacattgagtaacgtaaaaattatattttactttctaaaatgaatactttcgtgtttctgatccatgtagctcatgaataaaacttgtgctatttttccagtttacctgtgcacttaatgccgtctccaatccagccgggactgcagctgcacttgaagctcccggctgtatttgtgcatacagcatgtctgccacagttgtgtgctccgatctcacattcattgatatctgaaaagtaaccagtgctttaggaaaatgtttggcacaaaagctttaggggagggggggactttttaatgacctagaaatattcaaatactcatcctcactatggcgtaacagaaaacttagtatccacacagatgctaagctccctactgaacagttttgccttttaatttccaaaggcagaatgacatggtcattgcatttgtggttggttgtgcctatcctcctctgtaagtctaatgtgagcacccagccacatctcagaagagtgaccccctctccacctgacaaagtgagtcacccaaaacccttcatggttatgttttattggtaatatatttatttagacaactttataggtaatatgcatttatcacatcttcatatgcaaataaatgtgttgacatatcagaaaactttggaatgatataaggtatttttattcttaaatttaaattatttctgtttcattatgttttacttttagaagattcttattttaggtattatcatctcaaacacacgcagaatatgttgcttaaggcactacagcagtcactcctctctggcctcctaagagtccgcagcatactgtagtcttgaatatttcatgtaaaactcaagtcaacctagagagaactctcatcagaattaagaaactcaagattaggtcaagttagtaaaagatcaaaagcaatttcaaaattctccattcttaggaacaagaacaaaatacaatgatgacaggttttgtgacattcttttgtgatgtcactgataatcatgacatgaaaacacataggaaagaattatttttaatgatcacagcaagttgtttaggtaaattttaatgtggtctcaacagttacatgaactgacagaggtcatagggcagaccaacatagactcgtagctttgaactcatgactgggagccttaagtaactggacaagagagtccatcacatccccagaaataaagaaggccagtgtagggataattgagcttaatgtcacataggtgtttataaaagcaagcctctctaggcttgtctaagactccatagcaccaacagagatgtccacaggcatggtagtcccacaccgcagaaggtaatacactaatcataacttttgtggagttctgttttaatttccttcttttatttgtcataatatttggcaaataattgttggtggaatgaaggagctgctccagatactccagaatggctagggcctgagtgtgaagtgccccacacgggctcctgtgtgcagccctggctccccggctgtggtgttgtttgggaaggtcaaaaggctttggtaccatggcataggcagcagatgtgagcactcaagccaggcttgaggatgacacctgcttcctggtcaatgaagacctgccatcctgcaaaccaccaccacaggtatggctgctcagctgtcgtccctccccattatgacagaatgtcccttgaagtcacaagtcaaaataaatcctcttcctcctcagttgtttctattgggtgttccatccccacaagaaaagtaatggaagcccggcagtggtggcgcacgcctttaatcccagcacttgggaggcagaggcaggcggatttctgagttcgaggccagcctggtctacaaagtgagttccaggacagctagggctacacagagaaaccctgtctcaaaaaacaaaacaaaaaaccccaaaacaaaacaaaacaaaacaaaaaacaaaaagaaaaaagaaaagtaatggatatagaactaagacagactttaagtagaaaggactagaattctgtcttgggatttttaaatgttcagagaaggcagagattagaccccacagccagtaaaaggcaaagctagggttagcctggacttggtttctctggcgacagacacttcccttgggacagggatgtgtaactaagatccttagtttagtaatttcagttttattttaaactttcttttaaagacttaaatgttgatgcgactcagataaacatccataaatctcttttactaagtataatttcacagttaatctgcaatataatcctctccagtcttctctttattagcatatattcactgtataaaatggatctggttatagtttcatacatgtatatcatgtccttggaccatattcaacccctaattatctcctttttttctcctttgtctagttgtctagtggtcaaagataccactattttcatatgcctttaccttttcccttaatcttgcatttaagatgagtacttcttttgatagaggaatctcctttagtcactattactaagatttaatataaaattaaaatccaagaaaatattttaaattttgccctgttttcaaggtgaaagaaattctagttgcaagagggtgtgtgttgtgagctttgggagacctgagaacagtgattcaagggtcatagtcaagtctcacgttgtcaatacaatggagcatattagctagcttctgttttcagtgagtaagacgcaggtgagaaagagagcgggtgatacagtgcaaacacatttcggagttaacagcgtcagcgtgagtatggatgcacgtatgcgtgtgcacgcacacacacacacacacacacacacacacacacacacacacacacacagactcaggcatacaactcttgctaattaactgtttccatggcagacttgggcacgtggaggggaaactgagccataaggaaaacaagcaaacaaaagcacagcactgaaacgctcttcaatagcatgagggaaacagcacaggtctgccaagaacgtctctttctgtacaaatgttcccttttctccacaagtttgctccagacagaaaattcatttttcagaataagtggaagccaagcaaagcaaagaaattcaaattcaggctgacactgcaaccttcttaaccccacaggtcctctgtcacaaaggctcacacaggtcctctggacatggcccccctgaagggtcagggtgagcggcaagcagactccgtggcaggacttcgcctacgcgcacaaatctgccacacaggtccgagatgcatattgaacttctgtagcctccacagccaccatacagagagagagcttgccacctacaaacgcctgtctttctgcccctagatagcatccgccccatggatcctgagcccgtgtgctggcacataagcaatctctagaattaggggctgaggaagagggcatgacagcttaaatgcaagtgctacttggatttcttaatttaggtcaaaatttgagccaagactattaaccgaagagaacacccatggagtttccacaggctgacagccagagcaggaaaattagtggtgataagaaaagcaggaggaactgcccggctgcggcatggaatagtaggactctgagaccagccagaaacagttctcatgtgaaaggaaatcttgcttttttcaacaattctgatttttatccactggttatgtgatcatgtgatgccaggtaggttctaaaaattagcttgtgaaagtgaagacccacttgggtggcacccggcaatgactttatcttcttcccattacagttacttagaatgagcagcagaggtcacaggaaagctgtgaccccacccacttaagccaaagacagaggatccgcgtcctaggttccaagcaaacacacattctctctccattaaatcagacattcccttcagcagtatccacagtttggacaaagcttaacaagaaaaaaaaaatgaaatgcttagcatctgtgtgggctgggaatgcgagtcagtgggtggattcttaacgctgctgatgtgattgggagaagaaaacatgtttatttgttaaaatggaaacaatcagtaatgacaagggagctgaaatatttagacagagctgtaatagagcccagagggtgattttagttctcatgaaacaaagtccctccttaggaaacagcatatgtgttcttaataattgcttcccagggtactcatttaaaaatctatccaaataagcagggtgtgcatgtatgtggtgtgtgtgcatgcgggtgtgtacatgtatgtgtgtgtgtgtatgtggtatgtatatgcatgtgtaagtgtgtgcgtacatgtgtgagcatgtgtgtgtatgtggtgtgtgtgcatgtatgtgatgtgtgtgtgagcatgtgtgagtgtgtgtgcgtgtgagtgtatgagtgtgtgtgtgagagtgtgtgtgctatgacacagttgcgacatttctttttgctgttacttgtagtgtgtcttgcttatccacttaggcaagataagtatctcagtttacactagttgtctgggacattataaacactcctccttaacgggaccatcaccaaggtgacctgacggtgctcgaagctatgagtaatactgacttgaaaccagtctgaaagagacctagttacatgaaataaaaagacattttggctgatttttaaaaatgtgttttcaagtgtgtgaggcttgccagttcctgtctgtgtaagtcatttccggtccagtgtgatacctttggctgctactaacagggttattcccaggggatcttttcttctcaccctaatgcagcccctcctcccataggttactgcagagttctttgcccaagggggttgtctggttaaagtcagatgactctgatttgtttatgatcacagaccagtgggagaacccagaacacaatcgaggagtcttctcttccagacatgaatatcataaactattctactgtgatattgctcacaaaatgtggggcatcttcctacagtgctggctggatattgtcaaactgaaaagtaattttaaactgcagttgaaaaaaataggaaggtattggcccttctgaaaacaaaacaaaacaaaacaaaaacaaaacaaaacaaaacaaaacaaaacagagtttctctgggtatacttctgttcattgggcttactaataggtgacttctgtgctgtcacattggcactgactcagccagcccacaatgagtatgtcctgtccccccagtctttgcatctctgcagattcaattataaaaaatttccctttaaagatggatttccacgcatgtgtggcaaacagttatattgaggtctcagtagacttcacgttgcctctaggcatgttatctgaaatagcagtaagctcctgtacatcatatctatcatatctacctgtaatgacacaacaatagcatagacataacctgtcgtcatggtgaaagacctaaaataaccagctgcatgttcaccagttaaatggactttggaaagtggagctctacagactctgcctccagccaatgaagactctcccagagactctgtctcttcatgatcatcacagccctctgaacttcagtgagctttgttgttttgttttattttattcattacaatgcagcagagttagtctaccctcctcttcacgaggccagaccaccatcccttagcaagccttatactgacactggaagctgatgataagtgttgaacctgagagtcatttgtacctcagcatctatgtggatgagctcctgtttaccagaagggacccctagccaggatttctgtgagaagcaacaagggagcataaaagaatttcagtattatgcctcattcaatggcttggacatcctgtcatttttgaatcaccaataacattactgccatgtattagtaagtttgataattaacacagtcactttataactcataaatatattttgatgctttcttgaaatacactgatacaattaagagggggagccatacattatcaagttgccactatgacagttttaatgtttaagtcacagggccttgccaagcaacttttggaattcaaacctaacctattactttttcaatgtttttaaagtaaagttgccattcaaggtcaccatgatgttttaaattatgtcatatgccacaatctgtatctttaatataagttattatagtaaaatgttactgtctaccattgcatgtgtttaatttcattatttcatgtttgaagactacatctaaatacttatgaaacaacgtcatggcacagagtggcttcttccacttggtatttaatatgatagcctgaaaatgttgcgtaagggttacttaagtgctattgataacaaataagaaaactgtgaatagttcaatttctttatgccattagctaagtcacatggataaagacttgtttaggctaaaaagttagtgtatccaaagcactctaacttgaggactggtaaggacggataaaatccagggcgtttacttgaaaagtaatcttagttgcaaaatgaagtgttggcaaaagaaggttgctctgacaaagggttatgaatcttcaggaaccagcatgctcactaatgtgatccgaaagcatgattcttaacctataaagattacgccattcatcatgttcacttatccaacacagtgcacagttattttcacagatagaagaataggctttgcttatgttggttttaataaagcatggaaagtttcaaagggatagaggctaaattgaggaaatatggcacatgaaatagccacaatacagttaaaaatgtaagtttaaaaaggtgttaaattacaattattagggcagtttcttagttacttggcatgttttcgatcagtatgaaacagaaagaatacctgtacagcccgtttttcctttcttccctgaatatcccatatcacagtggcagatgaacgagcctttagtattttcacaggtcccactaaggcagatgtttggattcaggtcacactcattgacatctgtaagatagagatacaattcatatgtccaagtttctgttgtaatggatattttctccctgagaaaaagaactatgataaaaactaagaaaaggtaagacactttcactaaaaaataatattggaaagtaaacattataaaatattatatttagatgctttctctcagaaaaaaaatataagggactccattcatactggcatgtcttagtgctgactactcgtgtgagctgcctgttactcgggtggtgagtaaactcactaactcttgctgaatagaagctcatttatggggtggtttctctaggagacatcattctctgtgggaagataactgtgagtctgactgtgtgatgcctacaatttattggaagagaaggatcagtggttaagagcattggctgttcaattctcagtacacgcatggccactcacaattgtctgtaactccaatcctaagtgacttgatgtcccctcctggcctccactggcactagtcatgcatgaggtgcccaggcatacttgtaggcaaacatctgcccatataatagatgtgctcataacccaccctaggctcttatttctggccaagagggaatgtccttctcaccagaaataaactgaaaggactttggaagagatcactgcatagaaccagatgacatcactggcctgggtaagtcatgagaggaaggcttctgcagatattcagagcagtggtgagcttgctcatgcacagaaacaaactacccaggcctggggacgcgctgtccagtgcagcactcctccacattcacagaagactaacagtggtaccctttccccacagctgaactagaaagccttatacttcacagggaatggagcagcccaccagaagggtcttgcctcaacaatacagcaaaaactgttctcagctaactgctgcttaaaagtacgacttgtaaaaaggatcagcctggttccagatgaccaaaccacatcctcaaagttcaacaatacttccagaacacagagatagccagcgtttaatcaaggtgaaatttaaaacagccagcttacaataagaaagttatcaggcaggagaggaagcaggaaatatgacctagttgatctctattgtcagtttctcaatactgtgactgagcagttagacaacactgccttctttcttacccacacaagtcttcatgtcttcagatgccatgaacccatcatagcacaggcacctgtactccccaggtatgtttgtgcactggccaccatcacagatattggggttgtcttcacactcatcaatgtctgaggagaagaaaatcaacagctgcatgttatatagatattgatgttggctccattattcagtgaggaagtataaactgacccaatgtaacaaaattcagcccacttgtataacatgagcatctcctaaccctaaatctaaacgaagctttgtaaagattactctatcaggttatcctagggacagaggaggcagccaatcacaaaattctcagtgtctggcctgaattcacaattcaaaatgattatgaaccatattttatcattttccagttagaaatggctactttcaacatttgtttggatagtcagattacactgaggtgggctttgtatgtgtgggtgggggtggggattaaaggtcaaataaaatcagtgtgtttcttagggtcaaattctcttcttaaccagaggcaaaatcaaagtctgagtcacgcattctactttttaccccttgttggctgcctggctcagccagtgtcaggtagtaagacagtacaagttaggagagaggctctcaaacttcagcatctatccaaacacacggatcaccaggattgcccagggcttcttaactcagtagatttggatagaggctgaagttttgcaggctcacaaatcctcaggtcatagggctgatgcagaaaacacactcagaattgcaccaaattaagttcatgatgcaactttccaaattccgtttaaccaagaaaatgtcttgtagtccaattattacacaagtgctataggtaaacttccttcctctttcccacaatctcaactacatttaataaacaaagatctggtgttaaatgtcttgcttgaagacacacagctaaaatatgcaatagacaaggacttgagcccgaggttgttatactctgaagcccaggcctctgaatcactctacttgggggactgtgaagtgtgaagagtgtgaagctgctcacctgtgcacgatcgctggtctggcattagcgcgaagcctggctgacagctacattcatagctcccgtcagagtttgtgcagaaggtctcacaaccaccgttcattatgctgcattcatcaatatctaagagaagtgagaacaatgttaacatttgtcctctcccaaactgttgttgaaccttaattaccaccatacaagtattaaggagtggtgctttgagaggttattaagctatgaggaccgcacattgttgggtagcattagtgacaactgtaaatggatgaatatggccattcttattttctctcttgcctcttacacattttggtgcagcaaaaaggcccattccaaatgccagcactttgccattgcttcccagcctctagagctatgaggcaatgaatttctatcattataaattagccagtgccgggtagtccagtatagcacataaaaactgacagaggcaccttcttttgtgtttacacttggagcaatcttcttggtcactgattcaattagaaacatgaattaaggcttgatgggctgaggttctgatcctttgcaagaacctgaattgaagttttgagttgaccttggctagatttcaaaagaatttgggctgatttatggttgtgggtggaaaccgtctaagacttggcagttctacatggtgtacaccccaagccaggcccacactggcagcatttacacaatctcacttggactttgggcatgataaagccacagggcctcccgtgtcactcttcatgggggaaactagacctacggaggaccaaccacaaagcaaaattctcgtcccacaaaaacccatacttagggagtgccaaacatggcctcaatttcagggtaagatatcaacaattccatgttcttcttgtcggtgatcactcttcgaagtttttaaatcatctctactaagccaggcagagacctcacctcatgccttcctgcattttccacggcacttgctatacttagttcatcccagggttaattatcactggctgctcggctttggcatgcatttttttatgttcattctcaaagagcatacatcagattatgaatctttcattcatctgcttctctgaagaggaaagtgaggtgcaaatattgtgggccgctaggagaatcctacttgcaagaaagattaagcaaagggatccagcaatgaagccggaactcagaatgcattgcttttacaaagagatgaaataaaatgcatggtgaaatagaaagaaggctggaacttaccgacacagaagagcctgtcatgagtggggtggtagccagggttgcaggcacactggtacttccctatgaggttcacacaacgcccatggggacagagattcgcactcagctcacactcgttgatgtctgtttagagacaaagaacaacatagagatgtaagtgtctgaatcaaacaactgaccctgcgcaagtgttctaaaagagctacttaccaatgcatgcagagatgtttggggacaattggtgaccaggaggacattcgcagcgatagcttccctctgtgttgtggcaaatgcctcctcgacacaggagaggatctctctgacattcatcaatatctggaaaacagaaatgccccatgttgaagatgctgttcttcaagatggtaccttgatcttctttaccaggcagtccccctttccagcccccagttgctgggaatcctggctactgatggcttatcagttcccttctgtccatctcactcaagagcttgggaggtgagaggccacaacactttcctacattagaagcaatccacagtgaatcctaattgaccgacttggaaataaaaaaccctgaccttgtatcaacacaggacagctcccagtgcccttctcccctccagagctccctgtagggtccgagtatgctgcagtacagccagactccatactattctctctgccactctgagggattcctccctcaaaacacttcttccaaacccacagcaaaacaaagcacaaacaaaccaaaatccaaacaaatgaacctaagttcaccgcttgtgtgcaggaatctcttctcagaatattcacagggaacccaagctaaggtagggtaaggtagtcaccactgtcttctagaactgagatgcagacaccccgagatggggctcctgctatggcttacatctgaagtgttttcaattcaactgtgtcaggtgttgaaagttgaaatctctcagggtctcacagcttgcctatgtagtcacctatgattgttagcccctcagtgccttcctatatgagtctccttcggccacagactgccctccctggtcagaagactggacagcaggaactgcctgggacatgacctgtgaggaatgcaggcttctcacagtccttggcttcccatactcacccatgcagttcttcatcatcatgaagccactttcatagccttcatcacacttgcattcaaagtcccccggggtgttcacacactggcctcggccacagaggtcaggagatatgcggcactcatcaatgtctgtgtgaaaaacagcaggaagcagtgacatgagggctggcacaaccttacaaggtgaaacaacacagaaaaagaggaaaaatgtgaagactccaccctttctgcccctgcagacactgacctgtacagttcctctcttcagaatccagagcaaagccactgtcacacctacacttgaagctgccaatggtgttcctgcacttgccgtgggtacagaggctgggtatcatcttgcactcattgatatcttcaggaaaatgaaaatgcagggaagaaaagcatgtgggtaaatggttaggatctctcaccttaaacccagaaggttggagagccttcatttcaggtcttgtcaatatccatctcaaaaaatgtatgataatccagggctaggacttcacaaacatccctagttattctgacctctacattttaagagaacactgttaagggagctcgctgctcacttcctgacatgtggcaaggatgtgatcaccattgaccaatgattgtctgaactccaaatgctacttaaagcacatggacaatgacaaatacaacattcacccagacagccactcacccagccacacagccaccctcccaccctgccacccagccgccttcccaccctgccacccagccaccttcccaccctgccactcagctaccctctcaccctgccacccaccctctcacccactcacaaccatcatggcaacagaatgaggccctcatttagtgctctttgatgctttcttggttacatcttaaaatgactttgaaaatttaaagatgtcacttgaggtttagcttacaaataatccatgctacttttattttctcaacattatatgtcactaatataatttagagagcttcttgaatacaaaagggctgcacacacacacacacacacacacacacacacacacacacacacaacctgtgggtcacattgttttgaatttacttaagagaaatttaagtggtcttctagaaactgcctttctggacaggatagtttgagtgattacagtctcactgaataacaactgacaaaaagaataagagaaggaaggaacagagagaagacaaaggaaaaatcccttgctttatgtataaagacaatctggcagtgtttatgtactgagttcccattttcctgactcgattcagtcttgaagaatgtgagaatgaggtttcagatctccaaagccttacgtgagaggcagcacgaaaaactgagctgtcaaatcctccactaggaacagtggcctggcctctgcctgatcagaatgcttggtgaacaggagcccgggaaacagctcagctggggaaagcacttgatgcacattcacaaagacctcactttgaattctcagcatccacataaaatagccagggatggccctgtgaacctacctgtaaccgctgtgctggggacatagggtggagataggaagaccttgggggcctgatggccaactggccaaaaatgatgagcttcaagctcagtaagagatagagatactgtctcaggaaataaggtagaggaagactcacattttagcctctcactttcatgtgcacacataggagtaagcagatcttgcaaacagacacagacacagacacagacacacacacacacacacacacacacacacaaataccaccaccaccaccactaccaccaccaccatcatcatcagtagcagcagccacatggagcaccgtacatacctttgaagaaaggtttcccatttgtaatgtcttttgtggcaaacccaggtcctcggggacagagttcctcatactcccggctgtttctcaatggacactcctcacactcttccgttccccaggctgccccaacagagcagcagcaggcatccattcggtggcggccagcgatgggcaaggtgcactcttcatcgtcatacttgaggaagcaggtctccaggcggatgtctgtcagagagggcaggagactgaggagagctgctcttcactgtccaaagctaccaacttttcttggggaaaatacaacacatcccagtttgctatattccatgactacatttttctccagttggaaaccaggattatgtggtaggtattccagctaatgaagactttatcctcttcctcctcggacatgtttaaatgtcctgtttaaggaaggctcccttccaacttttggtatttcctgatagttctacataggcagccaatgaccgaaaagtgccactttgctgagtgtgggcatcttctccttgtaaagccatgttcatcaccaatgtgtgcattccacggtatcttggcatctccttcctaggagcaaactcactctgttgctggaatgtacctattgctcaaacatggccttggacttactacatttctggagaggcagaccactaatctggaaagagggcttcccttgttaagataaaagaggaaatggcaaacgaaagtcatccattcttctaagatgttttacttcaatgtgtgtgtgtgcacgcctaatccctgccccaattttaagctactgtgaaggaggctggcagaccaggggacagaaggcctgggttctgggactattcttcaacttactgtttcttagcaaaatcattatgcctgatcccaaatcttcacgcttgctgaatgcccatgtctcaggaagcatctcgatgctctgctaagattatgtactcaagaactgcaaagtatcattcacgtgtgtttttcttcccatttgccttcacaatgtggctgtgactatttacttaagtgttcaagttacccagtgtctttttttaaaaaagatctctctgtagcatttgaattgctctatgtccaagtttcacagactgaggcaggtaatttaaggtaaactccgtctttcagtcgagactctagagggatgcttctaaacaaggtccctcataaataaataaagatttgggtttggatttgctgatatccttaaataccaaagactcagagctctgaacttcccttctgttccatattgtaaacacttccaaattctatgtctgaaggttggttctcatttgtaaatgatcaaatttcctcagctgtattgacagccttataagtacataaagtagtcttcatcagggatattattcagtctgattcagcatcaaagatgtactatatgtgacatcatttatagagtcaaaggctaagcatcaagacactgacagtcataatactaggagtcagacagatacaacagctaagagtcatggggcatccttctgaggacttcaagtctcttccatgtcactgggatgggatgactagatgactggatgtgtcctgtcccctgggttctagcagttggcacgaagattcccatacaactggtagagatgatatatatccctatttcctagctttccccacccccaactccctttcctaggaagatttctgctcctgacatcaatgggggtttcctataagggtctatctgtcagttatagatcaaggctaatagaaatggggtacagctccccataacatgcaaatattcttccctctgcaactcagcctgtatcctacagcccagggcatatgggcagcagcacagtagcaactgggatggcactgagctgaggaatgaaacgactagctcagaagaaagcctttccttagcagagttaggaagacagtttgtcaagaaaaccaccctagatcctagcagatgagctgaatctgcaggggcatgtgtgcacatgtatgtgcacgtgtgtgtgtgtgtgtgtgtgtgcctgtgtccaaatatctaactgaattttatttatctttaccaagacagattcttcctgtagcatccaaagtcattccattgggacactcgcacttgaatgaacccctggagttgacacacaggccgttcttgcatactcccgggaacacttcacactcattgatatctaagaaagaaaaggaaggaagcattaagtcggtatatctgtctaagttaatcctggcttatccgactcatagattcacaatgattcttacaaaagaaagggccttttctgaaccggataagttcaaaaccctagcttgcctccaacagttcatattaacaacatattaacaacagttcatattatcgtctggtgtgtcttaatggcaagcagtgggtgtgtttactaaagccaggagtcttttcactggtccttgggaattgtatttgagttgtagagacagaggccaagggcttgggggacagctctggtaagtaagggtctgagagttatagctagcattaggagacaagatgactagacatagacaaaaattataaaagagggaaagtcttgcacttgagtgtatgaaactcaaatcctgctgtgggacatgtgggccagtgaaggcgtactgagcccatgtggtcggttgggtgagggagcgccaacatgcatgaccatccatttgtcatccaccagtgctgccccagcctactgagccttcccagtttgcctcatggggcaatgtgttctctgcacttaatttggaaaaacagacaacattgaattaattcaaagaaaggcaatctaaatgccaaaaggagggagccttgagagccttagttaacacacacacagacacacagacacacagacacacagacacacacacacacacacacacacacacacacacacacacacacacacacacgtctattttaaagaggtctctctctaagccaagagtgttgagaaaaagtctcaatgttttcttgaaagaaaactaaacagaaatggagtctaacctacttttggagggggttgttcctctgagtttttccttggccatttgtaaaccaaaatgtgctgttaagctcagataagttatgaacggctggtctgaaccagaaaaaagccaagggattcagtcatcatttggaaagcgagcccttgggtgggggttgtaggattcctctttgttttaacaggaaaaaaaaaaaccttccattttatcccacatatgggactgttgtttttgaaaatacttcagctgctgtgtcatgtcaggctatgttagtcaccgtgacctatatctactcaggactccatgagaaagaacctcagtgaactggagagggtccacatggaccttgaaaacagaggcaattgagttcacccctctaagtcacccaggaatgtgagacaaataaacaagcaaccataataaaaggggtggggttctagccacgaatgcaaactttacagtctttgcaaaaagaaagaaatgtcttgcattttttgctcctgatttgcagatagccttttgcaaacgtggccactccaaagatgcacagttgttctgaagcttatccagccacactgtcctctggcccttagtgatctaacactgaaggcggcttgcgcatttaacctcggttctgttctgtggctctgcgtaatgttttcctcggcatcatatccctcacagggaagctcctttactcctttattgaggccacgttaacacaaacactcttcatacacacaaagacgcacggtttagaagtaataagaaataccttcacattgcgtgcctttaattcttgagaaccctttaccacaaatgggatctgtggagaaacaaaacagtattaacggcatctatctagaactctcagtcatgacaaatcgaagcaattggagggagggcttgggacagcggttggactttgctgccacgaataagcacaggaccgcagagataaaagcagagaaccaatgagagttctctgctagcgaagcccagcctgcaggaactggtgcttcaggggaagcaccacaagctaatcacatgaccacataggaagagaaaatggtaccctgaccagaataacagaaaatagatgtccttgatattttgttggtttcctattcagggattttttttttatcaaggtcatctttaaatttttccacatggacctaagtcagtggactgaccaatgaaatggctgcagagccatgcaccggttctcttaccaagttgacagatggtgcacgggctcccccacgcagcaccaagggaggagcagcactcggacttcaaggtggctccgttgatgttgatctcacagcgcccgtcgatgacagtctgccagcaagtgcccttgatggtttctgcagaaagagggggtgacagacatttaacagaatcttataaaaaactcattgtatacactagaattatggctagagtggcattatgaaacagggaataataatcatttaatctcttatatctgaacttctgtggcagtcaaagcaactgttaaatgcaagacaactgtattattgataaacactgaaaaatcattctcagaaggatagatacctatgcagatggtttttgttgggtccagagtactttcaggagaacattcacaaatgaaggagccagggctgttcttgcagactccattaatgcaaggactcgattcacattcatcaatgtctgaaacaaaaccagatccccattactactgaaagttggtcttaagcataaaatgcatacctcgactttggccttcattagatagtaaagctggcctaaacaggttttgccaaactagaagggatgtcaaaatacttattgagcatatttctttattatagaagctggcacatgagtgagtctttgtattcagaaaaatctggataaaattatagactcaaattatacatgcacaacactttcttcatctattaagtgatggcaagtgaaaatgccagctagagtcaaatagaaatgaacaccctgaaaccaccacggatgaaggggcaaaatgctaaatgcaagtaagtgccatctgtggctagagtttgtacagtgtcatttagaagcagagaatctcaacagaactggcttgatcatctaacatagattctaacttacttctatggtggtctaatggctttcccagagagtggggtgtgtggtgggagaacaaaaaagcacaaataccttcacaggtttttaggtcaggtttgtacacaaatcctttggggcaggtgcagacaaaacttccaggtgtgtttcgacattgtccattgtcacaaagtagactgttcagcacacactcattaatatctagaaagaacaaacgggaatgttagaaagagcttgtccctcgcagccaatgccatttaggtcaggcctttaaattcctaatggtatatcaagtccaccaaagaggcaagactcttgttccattggcttaccctacacaggagcttatttttcttgtccaaactaagtgtctacaaagccccaagcttttggatgctatttaattcacttcttggattctctgaaaattagttatctttacttctgtaaatgatttgtagcattagaatcaaaaggactaatctttctgctttaagaaattaaacaaatagaaagcatcctcaatatgatagtatacatctgtaatccagtactaggaggagaaggccatgtaaaattactccaaccacagagtgaatatactttaatagacaatatatttttatatatgtgcttatatgttcatattatatatgtatataatatgcatatatattgcttaaaatatgagaataatcagacaagaagtaatgtttctattgagcatatggaaatggaaagtctatcagaatactataaggaacacaactattttccaagagttccaaataccaggaagcttcaaaaggcccagggacatatgaaaacagggattttcttctcctgggtccgagtccatggagagtcagatgctgtgtgagcagcagtagagttcagtgtacatacaagttactgatacttgataggctatgtgccaggctggaacagtgaacagacttttataccaatctgaattatccctgaataatcaattacttgcttcaaagttagatcagctccttggacagggagctccttcctagctctggctctaaaaatcccaccaaagtaaaagtgggatgcctaaccccaaagctctgaatggaaataaaaatatataatctgagatgtttctagtttatcttaaaacttatcaatttgcatcatattccataaaggtgtatttgttcttcaaataaaaaaaatgcaccactttacatatgtgcatcctttacccaagagcacacatatcttggttttaaaagcccaacttcaggaaacacaaggctgtgtgttgctccagacagaagatgttctcagaaaatactgttctaggcaactaaagaatgctggagaaaaaaaactaatgccctaggctgactgttttattcccaaccaaatgatttacttagtttctggattcttccttcattaaaggttgttatcacatggaaaagggtgcttgttaaaaccaatgtagagtcatcattactgaaaacaagctgtactttctctgattaaatctaatgagtagttgggagaactgtttcagtggaatggctctgtagccatgcgggaaaggctcccaacacttgcgtttcctacacttagcaaggctctcttttaccaagtgaatctgtcatgtgattcttcaccagaaacgtcacagaaagtgagctgaactccttaccgacacagtttttcccagttatgtctacttcatatcccgagttgcatatacatttgtaggtcccacggagattttcacaaattccatttgggcaaatatcaggatctaatgcacattcgtttatatctgcaccaccaaaaagttcaaagtcaatcacattctaaaacaaacattaaatgacaacaacacaaaagagtacagcacacacagtgagtgaccttagggcttttcaatgggctcacttggatgaggaaactcccctctgtttgcccactgtaagatgagtcacatcttcccccactcaagaccctgtagggaaactggcatctgagctgtgaccatagatcacccatcatccctgaattaggcaggagaagatgtgctggatggtccaagcaccaggatgaaggcagaggatgcacagggcccaagtccctggcatgtcaccacctcttccctcttgctcctgcctcccattctgccagcaaggtgattacatcatgcccttgctttaagttcttaagttcaacaatatcatcaaattaaagtatgaatcatgtgtttcctggctccaaattcggtgttcaagcaagcccccctctccactgtgtggggaattcattcagtaggtctcctcacaggacagagcctcttctttggccccgaggaggctacgcactgcctcctctgtgttcacacatactgagcagacctctctaataccagagagggagacaaagtggcggtacatggatggatggtctttatcagtcaaggttgtaatctgcttcatccccatgcctttgccacagctcttttgactcccccactgattcctccattatcacccttctcactcccccttttcatcactactccctcctcatcttcatccacatataaaatgagtgaatcagccagtctggttttcccccagaaccccctaatcaaattgcttagtttcatgagtgaggaagtcccttcttcttgtcaccatctttaccctcatctcagtggtctcctttgattctattctttttagtgaccccctacatttctgctatttctacatacaatttattttcttccaactcagctggctgatatgatttcttgatagaaaatctaagtggtatcttatgactgaaccttttagagttaagaaatcttttagtctgaatggataactgtttgtccaatctaaaatcctcagctgtatttggtaatggaaactcgtaaagattcaggctgctgcttctctagactgagcgacaccagccattgtatctcagctatagccctccacaaattgtccccaggaaaggccagtgagaaagccccacacccacagccatcaaggtgccacagaagctctgccacggtgggtgggggggcatcacctgtgacggtcagcaaggtgtcaggccagactgtgtcacaacagtaactagatacccacaaaaggctcagttctgcctttacatatgcttaagtcaggaaacttcagagtggctccttaccagtgcctgctgatgtcattcccggtccactgctgcagagtgcctgatattccgctgtaataaattatcagataataaatgagtgccttgtttgcagaataggtcaattctgcccttggctcacaccatcatttcctccagagcaaggagaagctaaagtggtaaccgaacaggaggaactcctgggggttccctttagacggggctttcatttgaagcgttttaagcgttccgcaccactgaggaaagtgactttgaaggatacagggaacacatagcaatttcttgggcaaagctcttttggaaagggtgctttttcctacaactcattttgttcaccagggaacactttacacgtacagtgaaatgtgcctgttaaaatgtggttttttcgctgttaataaaacttttccctgccatcctgggaatagctctgtttctccattctagctgtcttttccagtacaatcaggttctcccatgtcctctgtcctccacagactctctgggccctcctcacaagaacacagcagagcatccaagctcaagtgcaagtacagctgtgaatcatgtggacactgctcactttccacggcgagtacacagagaaactcttgatacatgtttagatcgttctctctttcttatcaactgaggtgtgcagacttgctccccaaacccgtgacagaatcagctctctagtacttatgaagcgttacagacagctctcacagcatccagagggatgtaatggtgaacggtgagaaatgcaagcacctggaaccagactttatacaaggcccagacatgagacagacctttgccagcccatggtttctggcagccagaatcagagtcacatacggagactgcacatggtggaggggactttattatagggaataaacacttgctctatttctgatgatggtagacaaatatgtttggacaacataaaatttaaaaaaaaaaaagaatcctttagccaggtatggtggcatgtgcctttaatcccagcactcaagacacggaggtaggaggagctctctaagttcgaagacagcctggtgagtaagttccaggacagacaaggctacatagtgagaccctgtctcaaaaagaaaagctgcacacacacacaaacacacacacacacacacacacacacactaaccaatgaaccaaccaaccaaaaccaagaaagcagcattaaaaagtaatccttcaaagtgtatgttttgtaataagcagtaaaatgttctttttgtttgtttgtttttgttttttttttaagcatttaaaaggaggccaaaatgggacaaggaggagaatgtcagccactgtgtatttaaaagccagagactgaatgatgacaacaaaaccagaagaaaaatgtatcttaggtatcttctcacactctcaactattagcgtggtcacggaactgaataataatgcaagaagacaagaccatggcgattctgtggacagtgttctcacggctaattcagattagccactacttggcctacacagaggcacagcgtggtcattgtgcttgccaccggccaaggcccaactcctctgtgtaattaaggggtctgaatgctaacgtacttatggctagaagcaaatccctcccctctgggtgctcttccccattccatgctgatgctctctgggtttaatgcgataacctaaacacaggcaggtcacactcttaacaaccacttcctaagctatcccaaggtagtgcctcaggcagcagcgtggcaggcagcatcgaagcacccagagttgcactcaaggctgactgctttctaagagagggaactagttggaggtcgagggggcaagaaggcttgctgaaccacatacattgggttaggagccagtggtgcgacttttcacagcctgcttggcttgcacagcacatggtgaccttggaaattcacatggtggcagttcctccctcagctgactagattctagagattgtcagtacctgttagatcaccctctcctgagatgagggagaccctaagaggatcttccatggtttgacattcctgtcaatcaccgaggcgacagaagagctttcttctgtggaccttttccatgcaaataccctcaggcactaaagcacagacatgagccagaagttagcgaccgggggcttccggtttagcctcactgcttcaagaaactgtgtttctttagtgaccttctcctaaacccatgtcattcccctgagtacaaacactcactggagatgctcttagtgcagaggggaaactgttaaagccaagaactgtatgcagtgtgtttctgctcacagtatgtgtgcactgtcatcttttacagctttactgacacacatctgtcttataaattcaaagtttgtgagaaaagcactttgaaaaatttgtgtaaccaaggacagaatatacgactgtagagttttatgcagtcattttgttccaatgactatttgaagtgaactagaggtgtatttaactgttttttttgacgacatacagatagtctgtgagttatccccagccaaagcaaccttctctttccagtggcatcctttatggcctttagagccttccctttagcttcttatgatattcacttcaaacactgtcatttcaaaggttatttttatttactaagcactgaaaaatcatacttaggataatttttaatgaattttacttaggaaggagatgaaataactgaatcttgtgtggacgctcactaactgcttgggttgtttgtttgttttagccctagctttatcttaggacaacagaagtcaactgccaagctaccttacgataatagtgaaagtaaaaatcaaccaccttcatgtcaataagttacattgttttcttcctaaatgtatgccagcttcactctaatgcccttcctcctccctcctgctggctctcttctttctcccaaagggcccctcttctgccttcatgacacaagcatttcatgactttctctttcctcccatctcactagccctttctactgttgtatatcacacacacacacaaacacacacacacaatttgcatatgggaggcagctcgacatatttcaataaactattttttctttatgaatctaaataattatatctgcataggaccgtctagtttacctagggaaatttattttgtaggtcagaacactaagaattccttgtccatataatctcattttataattactttattattattattctaagtctttttcaaatacttaaatgggcaaagctatgcacacataactaatctctcccaaatctttctgcctgtgaactgggcagcagagttttgactcacttggctggttgtttttcactaggcatgccacctaaactgtagaaaaagactttttccctaaagttgaataaagaaagccatttaagaaaagtgcaccagaatcaacatgtgggttgtgaacacaatttacaaatggccttctggggagctgttgggaatattcaggtcatctgaaagttatttacttttacactgtgtaaaattctgcttttctaatagtcatctcctgcaaaaagcaagcgtcctgaaacagcatgtgtttccaggagtgtgaccaggactgaggtggggtggttcctacagaggcaaatgaactgcttatggcaaataatagtgaggacagggagagtaacgtgtgcctagaccctgactagcctctgccaagaccccagcagggtctacaagatatccctgggaccataacacagcctttcctggtaacataggaaagcaaggcccttggatggtggcagaaggctggcaggatgaggcacatccatgctgccacttacctgaattctgtgcaggacacggctggcagggttccccaaaggcatactcagtgctggcacaacagcattccgatttggtaacagcaccaaacaacggcttcacgcactggcctctcctgtatcctccatagcatgtgctccgcatgtgtgtgtctaagtgggaggaaggagccatcgttggactgtcgttttaaacagataaaaacccccacactgaagccaacgctgcctttatttctccactgccctgttctaagccacagagaacgcctgtgttttcagtgcttgacaatgagaaaaaaatcaaaactaataaaaaaaataaacctccaaaaacccattagggtccagagcagtggggaccaatggccagcgtcaaccagtttcctctggtgatcgtagtagagcaaactgtgaggcccttaagtgctgcgattatttttcattcatttttgtcttccttaggcatgcacagagcaggaactttataaacactgcatgaaggcaggatcttacatggtgataaataagacctttattagaaatggggcttactcaaaaataaacaggcagttattgaatgtctaaattgggtctactttccaaaagggagaaagtttaatctgtaaaaggttcattatataaacctgcagatgttggtcaaccgagctgtgttatctttatctctagaggaggaatttccagcttcacccaatcctctcctaaatcaaagggcttactgagtatctttttaaaaaataatttggataaaagtcttgttatttaacaaatctcaaagccgtgaaaaactgtcattgcatgcttatgaattatccacatttctgtggcatcattcacttcccttggacatttaattctctattaaaatgcacaccataaaatggtatacatgtacaaaccagttctaaagacttttatccacaaaagaaggtggcagaaaatcaaagacagctatatagttggggcagaaaagagagaagagaaggtggggcctccccagcctctcctttacttaacattatctttctattcctaacatgagtgtccaacttattcaagatgagaaatggatttgttaaatcattgttcactagaaatcactgtatctcacctgctagggtaagacacatttgtaattgataagcattgatgattctgggagtattgataataaaccaggctgtggctttttttcttaccaacacacacacgtccgtctagacccacagccaatccggggaagcattcgcatctgtaggagccatccgtgttcacacagcgtccgttcatgcagatcccaggtgtctcacactcattgatatctgcagcatgaggaagcatttcattaacaccattgaacagttcattatggtaacactggaacatggataccgtggaaaatgatactctacaaccacagtggcatgctagtgggatgctcgctcagtgttcttccagagacaggaaagagagaggtcagccaagcttgggacttttctattaaaagccatcttaatagaaccctcccgagatagctgctagaaaatacaagaacacaaaaggcaagcagaattggtgtagggaggaaaatgaccactagaaggcaaaggattctaggcaacacatcccactgtagccatgcctggatctagcttgatacacactgcatctttgactgtgcagggaagcttttcctttctgcagtcaacacccaggttggcaccactgctagtaccagcctctcctgagacctctgggacaattagcaagaggcagacattaattaaatgccagagggagcactacagagagagaacggagagaaatacagggtgactttgatgacatcccttggtcagtacaacactcaacgacactagaagtttggaaaaaatctttttaaagcactgctgagtaattttagtatcatatgcatatccttaagtactgtcactgggttcatattaacaatagtagagaattcccccattaagagtagaaagggtacccaaactgagttttgaaaaaacaaggatgctcagaaccaagtcactttccaacagttcttttacaatatacaatagagtatgcaattatttcctttcccctggccttaaaaaggcaaattgagagtgaagcacctctgtgttttacttagcttgtgttatttggcataaaatgcatcctggtggtccaagacttcatgttcagactgtattaaaaacagcagttatatttaagaatgtgaactcagattggttcatttgtttcacgcatctttttggtcaagcagagaccaacagtatgacagtgaagactctattctaaaaagcagcctgaaaggcttcatagtggaacatgaagtctttcaactggcagaggctctgataacaaggctctcagccatcctgtgtttgtggcttcaggatgacagatgaagagaaaaatctcatcccacagcaagagaaacatgacacaaggaaaagcagcatatggtggctcccttctccccctctccgaagtgtgtttatttgagctctgtacactaggggaaaacgatgaggccaatgatacaaactgatctccctcctctcccttccccctctcttcctccttccctcttctcccttccccctctcttcctccttccctcttctcccttccccctctcttcctccttccctcttctccttttcctcctctcttcttccttccctctctacaaaatgctgagtccaggtgagcaactatcagttcttccacacgattgagtcaacaacactatttacataaaagacacaatttccatgatcaccaacggcttcagagcctacattcatctttgaggtcataacgtcctctgaaacagcataatttaatgccaagaggctgccacctcggtcaccacacctcagctttccaaatagcccagtaatcagtcacgcccttcccatttctttcccccatgtacagtatttaatttgcacaccctgacactttatcttactgcagaatgtcacaaaactctcttctccatgtcagctcctcctggcacagagttcaatgtgtacagaaaccattttcctacttcaaactttgaaaagagtcaactgtttgttctctactgaagatggattttcacaatattacaagccaccagtgtgaaggtcacaggggatgcaggtcaacagccaagagctggaagctctttaaaggttggagaaagtgcacaccttgccaagaactgaagatatacaaggctttcttccacggtaccttcaccagagctggagactggggacagtcagcagaggtgccctgtgacttcatcctgcctttgcagtgtcctgggctacatttctgcagcagatgctgtaaacagaggctcttggccacttagtagacaccctggactgacactgcatataaggatctgagaagaatgactccagttggtatcttgcatctacatgtaacagctactcactcctgacgctatacagcagcgaataggaacaaaattgtctccagcaactcttgttagaaccccatacagcacaaatggaacttccaagttttgcttacaatacttgaagcaatgagattattttaaaagttatcaggctaccctgactcctggtttatttttctgctttgtcctttatcttcctctcctcctcctcctcctcgcccttgacttacataacttggtaaagcctaaattcattgttgtttcttatgatagctagatgaaccaggaagggatacagcaccacaaataagtcagccccccccccccccccgcaggggaagatgggatgagttgggtgaagggaatgatcaagaagcatcatccccagctggaaggaaaaggcagaactcagctttatcagaaaactcgtcagagccattgaaacagattatcgcttcagctccttaaatcaccacacctcagctgatttcgggcccctccagaagaacccaaatgctttctctgaaataagactagccttgtttcactaacggtggctgtttggacagcggaacatgagaaggaataccagtcaggtctccaaagcaggccccggggaactctacatggggagaatcttccagaagctgtagggagaaggaaaagtgggcagcgagcatactttgggggtttcgtagcacccacctttgcagtagcggccatctgatgccagttggaacccaggtttgcaaatacacttgaaactgccatcttcattaatacacattccgtttaggcacatgtttcggatgctgcactcatccatatctagaaagagagataggcattgccttgagaagaggaaggcaggcctggatggatacaacgctagcttttcacacttctgtctcagtttttgttagtataacctaaggctaattttcatccatatgataaatacaaaaagagaagtcacgtgaaacaggtgtcgcaaattcaggttgactcttttggcaggggatagtgggatcctttcgaaggtcactggtccccaaaccaaaaggagcactaacgacttagttagctccttagttcctagacttgtttctgagaaactgaaactgaaacaaaaattaaggctactgggaatgaaaatgtatttaggctaaatcttggttcgttaaaaaaaaaaaaaaaaaccatagagagaactaatatgaagttgggtggggagggaggggagggaggacctgggaggggcttgaggaagggaaagtgtggtcaaaatatattgtgtgaacttcttaaaaacagtcatctaaagaataatagaaagtagaagaaagcttgccatttcgagcagtttgaagtagatattgcagagctggatatggtcagtgctagactcggctttgggatccagctgagctactaatattttgtccctttgatcacaaagacagttcttaatttcatgggcatgctggtctgtgagcaattgaagctctcccgagaggcctgcacctctggacatgacctgccttcgcttacaggcttttagtcaaactaaaacaatttatggtttctctttatttcttttatttaaaaaataatagatttgaccctaactgggaattttggccttaagtctgtggattgaatcaccgagataatattctgccaaacatgttcctaagaacaattttgaaattctttcaacatattaacagattcttgggatctttcctaaagaggttggaaaacacgataaagaacattctttagtttctgctgagggcccacaatgtggaacctcacccacagcactcatacatattccacaggggaaagcctgtcacaggatgacttcagaagtcaagataagaggctggttctccacacccctagttcttctcaaagcaattctccatgcccacccatggttagggggcttattgcccggcaggcactttgcacaaaagatttataggtgaccaaagaagatataggcataaacattgttttgtggttgttttgttgtcgctattatataaaactcctgcaaattctgattgcatagaactcagaagtaatggcacattccaaaagagcgtcatcactgtaaggtaccttcaaacatgcactgctgctagtatgtgtgactgattgtagtcacgacaacgtggagacttaggtttgccttccagaaagaaatttgtgaaacacttttgacagttcaacctttcacacagcacttgactctgtcttattcaagactctggatgtggaacttgcagtgtgagggaagcagccttgtaggcctgccattaccttcacagttctttccgtcccgcgtgacatgaaagcccgcattgcatacgcagtggaagctgccgtctgtgttgatacagcgaccattgttgcagatccggccattctgaagacactcatctatgtctaaggttaaaatttaaaaagtataaaagttaatttggaaaacttggaattactctctttctccctccatttctaaaggtataaccttaatctaggatttcaactgtttgataacatacatcatcatctatgcatacaggattatcaatgtcagaaagataagaggcagaaaagaacttagaggtcacatttactctgactttttattaagactgtttagatctcaactatatgaagagaatcaatttttcaccatttttctagagaatttatttatattgaactttggctgacatcacttcaaacatgattcaaagtaaatcttataacaatatcagaaataataacagaaacattattttatttttgagaaatttctcagttcttcctaacaacactccacataactacaagatgtccacctgcctcacagcagttctggaccaaatatactttcattgagcaggcatataatttttaacttaaactttatgactattctagctaccaaacaaagctcctgtggagggtgtcccctctcccacttaatgatggtgatgatgatatgacaggaatgttaaaaatgacataaaatattttttatttcattattaaaaccccacacctggtagacatcagggtagcctggctctgtccctcctgtcctaaggactgcaaatggatgaacatcacagaggatggctaaaacactcttgtccctgcagcatacaatcattcctgctttctgttcccagaacacacaggactatgtggagttggttcagagcaacccttccatgttgagtggaggccctgagtgcgagcatcctgcacaccctagcgaggaatgtgcagttatggcctgtccagttatcctgtctgcccagcgtctgcacggtgtctgtggctgaccctcctacgcattctctttccaggctgatcccacagcggtttctgtgtgagccattggactagctgaagcagtctgggcttttcttctgtctgatctttgtgccaaacccctctgagttcttcttttttttttttccccctttattcttaatactcactaaaacctgtcctgctctacaaagaaaaatagcaaaaatccacatattcttgaatcgattttaacattctataattttttctgaggttaaaataaacaagaaaaagagttcatcttttcttctccctactttcagaatgccatgggggatccagtacatttctagaaatctagacagcataaaagcgcatcactcaaacttgccttctggtgtttctttctcttctgtcccctttgaccccagcatagcgcctgagctgaaaacccagcctcctggatttccctgctgagactcttgtcctccaagcaccacaggtgtgcccttacccttggtaagtttcgcagcatgaaggagatggtagggaagctgcagtcatgctcatctctaaccaagccccacgttgagggtaacagcatggccctaaccctggcaggcccttgctccagccaatccctgctctacaatttgtcatagcttataagcagccaagcccttaacagtagtcttttctactgagaaatgtccaagacaccactggcactcacattacgttaactaacagctaaagcattaagaagattcttaaatcagctaaatactcaacctattcagatttctttattggatattttctttatttacatttcaaatgttatcccctttcccaatttcccctcctcaaaccctctctcccatcccccattcccctgcttctatgagggtaccctcccactcctacctcacttccctggcattcccttacattggggcatcaagggcctatctacctattcagatttatggttcagattgtaggctgctaatagaattgtgtagaaagactgtgcttccaagttttttgtttttgttttctgtccatattgacatttttggccagggtaccaaactacagtgatggtgatatgtctccaaatctgaccaaactcaaagattatgaaagtctttcagggatgaataccaatcctgctcaattcacacaaagggcttttgctaaaggaggtaaataatcatcttgtattagtagattcacatttttaagtggcagacatctccctacctgccctgtgtttaaaaactaagtgctcgcttagctacttatttattttaatctagtttttcaggataaatgacacaattcattctgtgctgaatatctagataaagctctcagttatttttttgtttgtttgtttggttggttttttttttgttttgtttttgttttgttttagacagggtttctctgtatagccctggctgtcctggaactcactttgtagaacaagctggcctcgaactcagaaatccgcctgcctctgcctcccaagtgctgggattaaagaagctctcagttcttaaagaattggacgtatatcttactcattttcaccacagaaacttaatacatgaatgccatctaaccaaaggcatattgaacagcataataaattatttaaggaataaacccatgacctgccaacatggacagtcgggaaacctcccaagatcccacacctacatgaagagctatagggaatcaatggcacctgagatggggacattttttcagggacaagcctccccagcagccagccctaaacacttacaagcgggcaacaccacatggactgtgtgtgtgtgtgtgtgtgtgtgtgtgtgtgtgcatgtaaacaataattaaagaagtggtgagtttgagaggggattgagggggcataggagaattttgaaggggaagagggagaggtggaaattatataaacactgtactgatgtccaaaattctcaaaaaattattgctaattttttatattttagtaaaacaaaaagaaataaacctgaggggcaaccttgatgagaagacatttacagtgctcctgaaatgtcagtgtgtacacagacggctgggggagcctgccaagggctggctctcagcagcgggcctcagggaggactagagattcaccatttcagtcaaccttcaggtgatattgctgttggctgctgcgtctactaggagcagagctccgaatcctcctttctatggagagacgaatgacatgtaatcctaaaagaggctttccccagtttctgccacacagagaaaccacattccctatgtcctggctggaagatgaaccaccagaaaaaataactcaaaagaagtgaaaataagctattctcctggcacacagacagctttcaaaatatctggatgtttgctagattttgtagcaacaccttcaaagaagtgaggcttagaataaggcaaaacaaaacaaaacaaaacacccatcaggtggtgtgggggcatgaggctgggagtggaggaggggtgggggtgaggggattagcctctcgcatttatgtttcactggattccttacaagccaagccttcatctgggacagacacaccccagtccccaagagccttacctctgcactcagttctggtgagtgtgctctggtagccagctctgcagtgacaggtgtaggagccctggttgttgatgcactcgccaccagtgcatgggttcttctcacactcatccacgtctgtaaaacacagcatgtcagtggaagtgtgcacaatagctcacaagtctagggcttcataggtttcttcacaaattaaaaaaacattttcctttaagataagaaaatgtcgaagccaggtggtggaggggcccacttctaatcccaggacttgggaggcccaggcagatggccctctgaattacaggacagtctggagtaccaactgagttccaggtcagtcaacactgtgtagtggaaccctttctcaacaaagaaaaactcagaaaagaaaggagattgcatagtgacatatctttttccttcccactacagtatgccaccggattcacccattttaagactggtaaagcagttcgcctgaacttgttctttgtgtcattttcagagaatatgaatatactctgagataacaaatactgctttcttatgtgattctggcctaagaaaatcgaacggacggacagacgcgaaagcacagggctcttaatccagctgctagaagtctgaggcatgacaactgcaagttcgagacctgcctagacaacttagtaagacgctgtctcaaaaaaaaaaaaaaaaagagtagtgaacaaataaaaagagacgtgcactagggtgttggtaaggggagggcactggcctggcatgtatgaaactctaccttcaactaccagaactaggaaaaaattaaagacactaaggttttggggttttttgttattgttattgttttgtttttgttttttaatacaaagaaggtctgtttcatgtctaagcatctcctgctgttttattaaaaatgtaagaacaaaatatatggagacaggtggttgtttaaagggaggttctcaattaccacctactcaggtggtctccatagccttagtactaaaatactgtggttgctttaaatactctgtagcgcagcccactggtctacactgctatttatgaataaactaagattcagcaaagccttattggtgtccaggtatcttgggagaagagtcaagtctgacctcgagccacacattcctcgctccctctcccatttcactctggataactctagaagcatccctatatgagcaggaaatgaacttgagaaagcaagaaccgactgagctcagaaacacatgaattttaaggcaagagagcacacatcagcagagtgctgtagggcccagaagtcccgttcgttgtccttgtgctatgctgaagacactgccctccttgcctctagagtctgagaaatttgaggtcaggaaattctttctctccaagaggttctgaagatccagccctacctgcacctaccttttaacccctggattgagagggcttcggagccactgtatgaggctgtatgattgttacaacagaaatagacaaccaatgcagactgtggaggtttgaaaaggaatggcccccataggctcatagatttgaatgcttggtcattagagcatggagctacttgtcaagggttagaagatatggccttgttggagtaggagtggccttgttagaggacgtgtgtcactagtggtgggttttggggtttcaaatgctcaagtcacgcccagtgtcgccctctgcctgaggatctggctgtagatctccccactacggtccagcaccatgtctgcctgcctgttgtcatgatctccgccatgacgatcataggctaaacctcttgcagtggtcctggtgactcttcacatcgatagaacactgtctgagacatgtctctcagtgtcaatcaagtggtaagttgcttaccgatgcattcgccacggatatccagctggaagcccttgttgcactcgcagcggtagctaccgggagttggaatgcagcgcccattttgacagagatagcggaccagttgacagtagtcagtaacgttgaaaggcagcacccctagaagaacagcattgaaccccatcaaaattattcacatccatgacatcagctcttaatctgtcaataatgaacaagataccaagtcctaaagtaggtaccaccaaggctgagccttcagagagcacattgtaccttgccacaggaggggaggtgctgtggcccagagacttctctgcctgcctctcctcaccccacccacctccttatgcttaagcctccagtttggggaaataactagggcagcagggtgctggcagttaactaactgctttataatatcatctatcttctgccattacttcattctctgaatgcgattttagtctttcccataccactcccacatctgattgagaatatcaataacaaaaggacattcaactctggaacataccaggcttccattcttattttcaaaacaggaaaactaagaaactcataaaactatgcaaaaaatttttatttagcaattggtgaaaatatatttaaagatgaaagtggcataagccaaaaataggacctattaatgcaagaggaagtgcgtagatggcttcgcaactcttacttggtggttcccgagacggagatggatatggatattctggcggtggccgaggggctggaatcacaggcccaggaggatagccaggaggaacgggctgaactggaggaagggggccaatgggtgggggaggatattctggtctcccgggaattaccagagggacagagcacagcttgttgaaatcctctggaagaatacaacacaacaggacacaatcagtagagccataactgccaggaggctggagaagacaagcctttatgaatcgcagtgcactagccaatcgggataagcaatatcactcatatttttaatatgtgcacagttgagacaataatatacacattgagacaataatgacaaatttaagcaaaaaaaaaaaaaaaagaaaaaattaatgtctccagagcaggtaccatgtgctccttccaaaatctagaaagatatttgtttacacgttgaaacccagcaggaaaaatgttaggcgttattttctcctctggccccaatgtagctgtcacgggatttaaaaagttcatcagaaggcgtgtgtccttattagagagaagtacatgacataggtagatgatggcgctgtaatgagacccattacactgaatctcaatcacttcaaagttcacagacttacaaaataagggctagcaagacaacacaaaaagcatagcagcagtagaagttcaaagtcacctttgaacttctcacaccaagtataaggccagcttgtgctacatgacagcctactgttgtttgttcttggtttttgttgttgttttgtttctgtaagattttggtttattttatgtgcacggggaagccacagcagtctccaacaggtagcgtgtgatcacatgagtcttttcagatgattcttgctgatatataaattctatagggaagaaaggtttgtgtggaaatccaaggacaagatactgatgaacacacaagagaggtgggggtagacctgacagagtgcacaattgtcccaggataactcacaggcaaatggtaatgtttggtaatgggaacaatgtgagagccccagaactaagaaatgaggaatagttactagtgttttggctgttcagataggtacatgctgctgtcctttacagtcagaggaaaaccatcacgagctgcagactggtgtggggagcggaaaccaaaagttactttgaacagttgagtcaaatggtgatagcacacaacaattggtgaagagagtttggagcccagagatgaagtcattttctttcctgttatcagaagagaggtaatatttaaagcaatgggatggaagaattctaagaaatgcagaaggcaggaagtccagagcagagctctgaggagttgtctggtcaaaacaactagacacaaggagcaggaagggcagggatgcacagcttgtggatgtcgcacagtgactctgtgagctggggcaccctgacttgatcatgcatttccctgtgttcgcccatttcgggcttgagtacttatgtctttttaaacaataccaggcctctataagactaaatcttccataggttcatgacatcttttaatttccagaatggttctttaggcagtagctagtgcatctgtgacaacagcgggtggtcacagtccccttctacaggcagaccacagcagtttacttctttactttggggctagaatgtcgataactttactcacagtcacaaaatgattcttatatagatttttttgttttgttttgttttgttttttacagagcgttaaccattagcacaaattaggttaatgtttatctttaccggtggaattctggaaagcactcataactcagcctcgtggcacatcctgccattttacatttgactaaacacaccaagctccacacgctgtgctgttactaacgagtccatttctggacattcttcagtcttgctcctcacctataactcagacctagttcaagcttccagagagttccattgctatactccattacttatctggaattttgacccacaaattcttggtatctcatcgtacttggaagggatttttcccttgtctgtgttttcctgactcagggtgctaaagttccttccactacaccacagtgacttttcccacagaattatcatctagatactccacatcgaccattctgaggacccttcccaccacattgctatgacccactttaaatctggaccatatatgagcagtaactaattctcactctcagcctagcctgtaaattacataaagaggatttcagtctatgttggatttaactgaattttgatgtattaaaggaaacattttgttttcaagcacttgttagtcctatagttttaaaattccttttggatttgtgaaagcagctgaatggcttattagtatttctgctaattaggtgggtagattactttaagatcaccattaacttcatcttaaccctgtaggacacgtgtctaactgggccctaaactccttcttttctatagattttatcgatgagcctctagggatcagcagccagagataaagtttcttaattatcttttctgtctccattcaactcagagatgaaacacagtttaagaaaagaagaaaagaaaaagaaagataaaaaggactaagtcccttttacatcaccgctttgtacaggcgaggcccagagctcagcggtactgtcttggaagatttgaacaagcaaaagccgaccagcacgtgagtctgcatgacccatctgctttgctctgtgccgtgtcatgcttaagtctttcagctccctgcacacacaagccacacacaagaaccatatcttcctgaactagatcttcctgctggcctctacatctactgccttccctcctcactcaagtacaaggaatccaatcaatgatatagattctcaaattgatgtgtgcatttaagaagcaattcttctggtacccaagttatgcatcttgatagaagtcatgcacttccagaccatgatctaggggatagttctgcagcaaatcaagaggaagggttactttttaggacatttgacctgttgaatcgtatgtatgtatgtatgtatgtatgtatgtatgtatgtatgtatatgtatgtatatgtatgtattatgtatgcatgcatatatgtatggacacccaaaatgattgcattacttctacagttcacacctacagttctcagtggtgagcagcatcttatactgacaccatcaatggctctatagcgatgatgagaactgcacatcctatggtcagcatctcaaaagcatcacaccatccctgcactcctccaccctgaggttcaccacctcccctcgactctccgattcgaatgtgcctttcaggaatcaaattaaacagggctaaaaggtcaggttttcactggaatttgtggggaaaagtcattcttcatgagctgtatgttctacctgaatgcctcccaggagcaagagtatgctaaatactacggcagtgcagagagcatgagaaatataagattgcagtgaggactaagacctcttcataagatttattaactagtgtcattgcagcacatggacacaggtaggcacaacacagggcagtgtagaccttgagcacaaagaagttacaaaccactggaccatgaggatgtaacctcacctccagctgtggttggcttggcatctccatggatcaggttatgtttgcacagatccttagccctctagaggagtggctctcaaccttcccaatgctgcagctcatgtggtgaccccccaaccataaaattattttaattactacttcataactgtaattttaatattgttatgaattaagatgcaaatatctggctttctgatggtcttaggtggcccctgtgaactggtcatgcaaaccccagaggggccatgacctacagtttgagaaacactactctagcagatatgtagacagcagggactgtggaagaagggagtaaaaggtaaagtatgaactgtgcagatattttaggaaaaaataactcatttcttttagaaatgttgagactattcaagggaaacaccaccatatagtttaaatagaaaataaaactctcaaacattaacaactaaaagaacttagttcagctttggggactccggatgctaagccaaatcataaatatttctttgcaggaaaaggcatcatttgaaccagcaaatatcacctgtggccacactaatgacaatattccagacatctttctatacaacctctccagcgattgtcaggtaagctatactttgggaaatgtatgtggcagatcccccactggacacgtgggaggccaccccaaccatttggattgatcagctttccatggaaacaaaggaaatatgacagataattggaaagctacaaaggaaaacaaaaacaaaataaaaacaaaaacaaaaaacaaaaatgggacttggcagaaggaagaggaaagtgatgactgctagggaaagggaagaagtatgtggtagggcagctgggctttatcgttctgagctggtaaacatcacaggagagacaccaggtccctgttgaggaatacgagaaaacagagactccatgctactctatggcaatgagagaacgaattcaccggcagatctagaaacaagccatgggtttggcagggttgcatgggctatgctatagatgctgtatagatggactcttaccagttgacctgatgggacacatctcgggagcaacagtaacccctggagaccagcaccggccaagatcgcaacagcactgcattttggttatggactgtggcagctggttagagcagcgcccgtttgccagagctgtgtagcagtaaccagggcgaacatctgagagagaaacaacaagaacacatgtagactttgtgatcatgctagggacaacattcctctgtctcaatacctccaatgcctcaccctggggctatgacagggtgacccatgagtgtatactctggaaaggaagctttgagcccttaagcattccactggcccagtattcaatcagaaatgccttgtctcataccttgcctctgcacactgggacaccttgccaaaactccacattccatacccagggtgagatgaaatggtttaaaccaatgtgccataggaaaaaagactaagacaatcaccagtggtgacagacaattattcataaagacgcatctctgattaaagacagcctgggtcgtttttggtttaaattacataattcaaactactttaggcaaacatttgcataaattcatttaaaaaaacattcaactgtgacatgggcattagtttttagtctgaaattgttcctcagacttgtgaggttgtgtttttaagggtggagtcaattttcagcaagatttaatgcttattaatcaggttccctcttgtcctgaggctctcaggaattttttcaaagggttaattattaataaattccaaaacatcaccgactgcaaattcttagtcctatagggacccaacagttctagatgagttcttttctttttggcgggaaagtatcttctcacagcagcccggtggggcactctcctatagatcacttttattggattacatcatgtctgactgtcatgacaacagcttacacactatggtacaactctcagctaccaaaaaaaaagagctcagcgcacaggaaaagctcctgaggtgttcctgggaaaaggagaccatagcaaggggtaaacacctatttctatctacacaccatggctcaccaaggaaaatacatctccgtacataatcaagtatataatcaagttgagaaaagcaagtcttatctgaaatatgcttctcacttaatgtaaggtgcatgaatggactttgtaacatgaaaattttttggcagccaaaaccctatccctatgtgccctaagtctgaatattcagcatcaagctttgccatagagggtcgtctgtatacacttctctgaggcatccttaaaaacacaaagcctttgatggttttactgttgaaatgcttaaagataaacactcataatttaggaacatttacattgtttactttaagcaaagaaggataagacgaacctagacataccacagaaaaagactaagggtcagcatcacacacacaagacagtttctgagtggtacttatgaccaccaccaagtacagatgcaattcccagaaaatgttaattctggttcaggtacctctgggcagacatctcagcaagaatgggtcgtatgccagctagatctaggaagagtacctacacagggggtgtagacaagccttctctgggaagtccacagtgggacacctctctgtgaacatgatggagaaatgggagttctacattctaactcgaaaggtttcaaagttaataatgtttatatattatgctattaaatattttgggcacagaacccaaaggctattaagaatgggcagaggaccccaagcatgagttgtgtcccagctgggtagtcaaaacccagttgtaaacacttgaccacattatgaaatgtgtacatataattagcagatggatggtttctccttcagagcaaagctgggacctacagttgccaatggcaaacttttaacaggctaatgactattattttgcaaattaactgataccatgtggttacagttttagatggctagcatgttatcaatgagtcagagactcttgatccttgtggtaaaatggggactgccggggctgaagttacaagctgccatcaggttattggcagcccttgatttacaaatagcatcatcagaggacttgagtttggctcccagcacctgtgttagaaggctcacaacttcctgttaactccagcttcagggaatccaacaccctcttttgtacctgtgctcacaagcacacaaagtcacatacacatataattaaaaataatgtaaattagttttaaaaagaataaattacaccttcatttaattttctgtctttaggcaagtaaaacaccacaacggataagaacagaccttctgtgtgtggagtagagggtgtgtgtgtgtgtgtgtgtgtgtgtgtgtgtgtgtgtgtgtatgtgtacaagtgtgtgtgtgcatgtaggatgcatgtgtgtgtgcacatgggaagtgtgtgtatgtgtgcatgtgtgtgtacaagtgtgtgtataaatgtgtgtgtgtgtgcacgcgtgtgcgtgtgtgtatgtgtgtgcatgtggtatatttgtgtgtgtgtgcatgtggtatatttgtgtgtgtgtgtgcatgtggtatatttgtgtgtgtgtgtgtgtgtgtgtgcatgtggtatatttgtgtgtgtgtgcatgtggtatatttgtgtgtgtgtgttgtcttacctggaatgtgtatatatgcaagtactgacatgcctgcagtttgcgtggaagctttagatacagattgaaagccactaatttccatgtcctggtgaaaagtacctgagatgcttaagcaagaatgttacttacgcaaatcactattttaggaaggtaagcctgacaaagcagatgtgtagaagccagacccagtaaagattattgcaaaaccttagacttagattaacatagattctggaaaacagctaaatgtagtcatggagagacaacatggctagacaaagagtgaccgcaccttaactcacagactgacagcatctacaaatccataaacgaggacacagaacctctgtaggtaacaggctctctactcttgaatgcatttcctgaaatgactggtcccattaacaaacttattcagagagatgttcattgtggtctatgaataaaaactgtgcccaccatctgtaattagacccacctacgcatctggtgccatcaggagaggtgtaaaaaccagggggacatttgcagaagtagctgctgacagtgtttgtacattccccgccatcgcagactccaggaatggtgctgcactcgtcaatatctgaaatagaaaatggagttcttgtcatctgggggccgcaatatgaaatttcatggccacaaggattgcttttgaagtcaagcccccagaaagcagctgtctgcaccagatagcagctgaccagagaagagccgatgtagacagacattcccgagggatttaccagattcaaggaagggagccaaataaacttatgtctctagaatcgaaactagcagactaatagcctgctaatatttcaagtgcatttatcttgaaagcttgctctctctttctctgcatattttgtactagattaaactcctccgataattattctatatgctccatcatcttctgtatttgttctaatcaaatttcccacaaggcagatactgtaatccctcagagaagacctaatggcctgagcactggttgggagttgctgacctgtggtgaccagactaggggtaggaagtaccaacgtggttttccaaaggcacatccaaataaccacagtagtgctcctgggctggggagtgtgcacttggtgagtgaactccagacaatgggatgttctagtcagctttccaacagaaggactgcctgctcctactgttggagatgtggtcaacagactgcgcttgacttttggtcctgtaaggcatcatggagctgcacacaactgccttgcctgaggtcactaggaagtcatgaaagatgagtatttctaacggtgacttgactctgcaccacctaggtcacttatgccacactgcccactgtggtcaatcgatgaggtcacatgatctctcctccactcctgccacttctccctctctcacacacacactgatcctaaagaaatgccttaacgaatatcttaactgccacagaagtcaaaggcgattggctgctagggctcattaaggtaaaacaggatgagagaaattgtcgcatgtggaggtttgaattccctaatatttcctccccggtggtctgctctcatcagtagacagtggtggaaatgccttgtgggatgggctatgtactaaggggttccaccagagtcacaggctagacttcttcctcctggttcatcatcttacaggctcctacaactctatggttatctcattttactagaacttcaggcatcccaaaatggtgacttgagcaaggtttccataaatcagtctgtatcagatgccactcataaaaacatatcagtttgacaggcctgctgggtacagtgggatatatatatatatatatatatatatatatatatatatatatatatatacacacacatacatatatacacacacatatacatacatacatatgcacacacatatatgtctatatgtatatgtgtgtatagtaatatattacattatatacatataatatatacagatataagtatgacattattgtggtaaagagaagtcccaagcactctaactcacatatcagggagtgcatggatgtagggaccacatggtaaaaattactttgccttgtactctgctcttaagattcctggaggctaggctgatgataatctaaatccccaaacattaaaagttaaccattaattcaaatgagttcttccagatataaaatgtaatcccttaactacatatttttaatttcttaatttcctcgcacagtaagcttggtttccagaaggcgagggcacctctgctccttcagtagaggagctttgcagtcctcagaaaaaccagcaaagaggttttgctgagaatcagcctgcgagctctgatcctctttctccaatcccagctataaacttccatctttgtcttttaaaatatttaaaatctaatattgaatcgctttggtttattcatttacatttcaactgttctaaactgtatatatgtattaaatcatagttaatatgttttattgaggttttagtaaatgacagggagaattctgaagaggaagctcaaatgacaagcacttcagtagagcagcctgtgatggagctgtggcagctgtcacctcaggaatttgctagtactcactggactgaagtggattttttgtttttaagataatataagaactacatagaagccgggcgtggtggcgcacacctttaatcccagcactcgggaggcagaggcaggcggatttctgagttcgaggccagcctggtctacaaagtgagttccaggacagccagggctacacagagaaacggtgtctcgaaaaaccaaaccaaaccaaaccaaaaaaaaaagaaaactacatagtttcttcctttcaaactcaagggaaagcacactttaaaagccagccacagtgccagtgacacagctcggcaggtaatggctctggctgccaagcctggccacctgaggttgatccccaggacccacgcagtgaaagaaaagagcctgctcctgcaagctgtcctcagacctgcacatgagtgatatgtgtgcaggacacatacaggcacacaaacctttcctcttcttaagttgactaccccaggtattttgttatagtattgaaaagctaactctcatgcagctttcacaaagcatgctaacaatgaggaccctgttatgccagactctattcctggctacacataggatttgctgttctctttgcatttgtgtgctcaatctgctagcatccctcccttgaccacataggacagcctgtgttcaaatggtgccattctccaacctgcagaaggttgtgggagactttcttatgacatttctaccagggcaaaacaggccaactttattccaaccagtcccaggctagagcaaatatagtagtaacaaggaaatatcatatctgatgtcaatttgcatagaaaaatagagacaggaaaaaccaccacctaaatttaatataactgtaggcagcagaggaaagatgagctctcaccaaagaggtctgttctctatcttgctatagattccaatgcgcagctgagaatttgtttttattgttaaaaaatattaattctcaggttgaatttttgatttattagatatatcacaaagtaggtttcttaggattaataaaaataaaagattgagttccctattttttctgtgtgagcattatatctgaatattctgtgtgatacacaaccatgactgtttctgttagctagcctaatcaagcaaaaagcaaaaggcagaaaatcaatttttgttcaggcaggaagtactctgattttaaaagacaaaacacaggctagacaggccatatggtctccattgccctaagtcttgaagctgactatatcttttgttgctcaatatagtaagtagagaaaagcttaaaaatgtgacacacagactgttgttgatgtggattctgcatgcaggaaacctcattacatcaacacaaaagatacctttaataatggctgaatatccataccagaatattgttaaatagttccaagcattaggaattggaataaatgctgggcatgagggccttgcctttattctcagaacttcaaacatggaggcaggcaggcctctgtcaattagaggccagcctggtctatatagcaagtttcaagccagccaggaagacaaagagagtggagaatgagacagcctggtctatataacatgtttcaagctagccaggactacaagagagcaggggtggtggtggtggggagagagagagagagagagagagagagagagagagagagagagagagatcaatacaatatagtcgattagcatcagcataagagagtcaaaatgaaccctttgcagctacctaaaggcctcaagacactcccatcatttacaatgtggaaaagcagaccgacctctgcccctgtcagtaccaatactctctacttcatcctgatgtcaacagttcctaagatcagtccccctggagaaaaccagtcttattgttctttaaaacatgagatgtttttatgaagcccagcttcaggaaggaagtaaaactgtctcatggttctatagttgaaataactgatattttatatattatatatgatatattttatatatgttatacaaatttcatatatattataaatgatattttatgtagatatatttatatatgatatattgtatatatgtacatatatgatataaataaaaatacattctcgattgcaacagcaattataaattatgccaattaataattttaaaaaccattgaaacccgcaaaggcaattctatgacaactagattattccattctgggcaagtcatattaaatgtctgactatggtttattgatagtacttcacatcagaagctgtcttctgttgctttgatagactgggaactcatggaggttaagaacccaaggatagacttgttcaacaaaaaccacagacttttaattgaaactcaggccacagccggaggatggatgacaacaaaggaatggccttgtctgagcttgacccaagatggagttttgcttgttgctccaaggctatcagaacacactccatcaattcagcaaggagaactgagagctatacatattcccaggatgcttgcatctcaaaaacaaatcacttccctggaaggcagcctgcttctgcatataacagcagagctagatgtaaacatgtcccctgtgtatacattttagaagcctgctctacaaatgaaacagaaatagaaaaatcacatcagcttgcttttttgcttggcttttcatccagtagatatcaaggcccagaaaagaaaatcctaaactctaactaagagcacaactatttatgttagtaagtcacacacacccctcaaaattctacatttaactagaaaatatcagtagtatagtttttaatggtatctaatagtcaactttaaagtcgtgcctccaaaactatacaaaacacacgtcttgaacactttaagccaaatttcagctgaaaatatttcatgtcttactacttatttgattcagatgcgcctcttattttgtttctttaaaagcagaacaagctgcagaggcttttctggttccgtgaacggaagatgcataatttctgtcagactgtcatattttcagcctcctgggaatgacaaacccagaaggtctagggtttaatgtgctaacaagcttgctgctgatgccaccctgtctgtcttcctcattctcttgagctgcaaaccatgaggttgcttaccttcacatttttgtgacacttcattaaatttgtgtccagcagggcatttgcactcaaaagatccaacggtattaatgcaatttcctccttgacacatccctgggatggcctgacattcatccacatctgtcaaatttgggaagagagaaagattcgttgaagaagaaaatgtaatagttgatccacaattatatcaccatgtttatgtcaaagggacccaccacagctttcaggatatgacagcaactgttataatacattatgtaaataactaagttgttaacatagcttagtcaataatgctcaaggagaagccctgtcttaccataggcagaggaggtcattctactaaatgtggggcttcatcatacacagccgagtagaatatacaatgattaaaatgacaacttttactgtgtccttttcaccttcagattgccaataataatcaaaattatctaagacatccttcaaaggcaaaatgtgatgcacgtttaaagataaagataaagctatcttgaagtgtttcagtcacacaaaatttatttgagatggctgagattgccatgtgacagctagtgtcttcataatgtatttcccttataccctctggaaaatcgtcttgtgcaggaaaagttcatcagggccagaaacgagatctgtgctggagaatgtgagggttcagcggtagatccacccacaagaactcgtaccagggatgacctttgaaagctaggatcatgtccctccccatcaccactaattcagagaaagcctatgactgttcactagtctatggctactgtgatagcaacatccagcccctggtactcaccaccaaccatcctagtaatgaatgtgttttattcttcaacaacatgggcttccccgaagcagactcaatccaccacgctcaatgccctttctaaggacctagagactagcctctggttctatatatagtcctaaattaacctttccaacagaaacctcctcctcctccatggtgttggctgcctggattccattgtgaagacaatgtatacaagtgtattctctcagtttcttcatttggaaaatactgattcaataaagatccccaacaggagttaaggatctttatcttagactgtcttgtagacataagtgagcacagtaccctccctaggccctgatggtatgagaagcaacagagcgagtgacatttccaggctcttaccctatgctgctgggaaaagtcaccccacaattaaaggagaaccagaggagaaatatttgtttcggaatagaagtgtcaccgttttaatagaatgttctgacccaccaatgactatactaaaacaattgtgattatattctacagccagtttcatttttattttagatcagggtttttctgaatgtttattaaaacatgacttgaaatcacaattttaaagtcagagaggcaactctagatagtcttgttgatcatgagttttagccaatatgaaggcagttccccattgaccatgaactcccagactatgcctgtacatctgtgtctaacaacacatttgcccacagcctgcatctggcccaagggctaaaaacaccagtgagaggacaccctggctacatataacacttcgagaacctcctccagcaaaagaaaaaagtcctttttgcaagtgaccatataagctgctattttgaagccatgagtttttgccaaacaaatgtttagtcttccccacctaggtgttgatggacagtcaagaagggacaggaagtaaatctgggggaagtccagactgtacgagaggactatcgagctgaggagaatctatctgccttccctctcttctccttccatgtctctttcttctgctggttcccagacctctgaccggaagctcactgacaggaagctcactgacaggaagtgagggtctgtctccctagtcactgccaacagctcatggctattagcaacttcaaaatacaatgaccaacaaattcctcaaaactcaaggagactttctaagaaggagggggaaaaaaacgacatcaaaagagacgcctgctcagatcggtcctttgcaactctaggattttattttttttttttttttttttttaattcggtatttagctcatttacatttccaatgctataccaaaagtcccccttacccacccacccccactcccctacccacccactccccccctttggccctggcattcccctgtaccggggcacacaaagtctgcgtgtccaatgggcctctctttccagtgatggccgactaggccatcttttgatacatatgcagctagagtcaagagctcaggggtactggttagttcataatgttgttccacctatagggttgaagatccctttagctccttgggtactttctctagctcctccattgggagccctgtgatccatccattagctgactgtgagcatccacttctgtgtttgctaggccccggcatagtctcacaagagacagctacatctgggtcctttcagtaaaatcttgctagtgtatgcaatggtgtcagcatttggaagctgattatggggtggatccctggatatggcagtctctacatggtccatcctttcatctcagctccatactttgtttctgtaactccttccatgggtgttttgttcccacttctaaggaggggcatagtgtccacacttcagtcttcatttttcttgagtttcatgtgtttaggaaattgtatcttatatcgtgggtatcctaggttttgggctagtatccacttatcagtgagtacatattgtgtgagttcctttgtgattgtgttacctcactcaggatgatgctctccaggtccatccatttggctaggaatttcataaattcattctttttaatagctgagtagtactccattgtgtagatgtaccacattttctgtatccattcctctgttgaggggcatctgggttctttccagtttctggctattataaataaggctgctatgaacatagtggagcatgtgtccttcttaccagttggggcttcttctggatatatgcccaggagaggtattgctggatcctccggtagtactatgtccaattttctgaggaaccgccagactgatttccagagtggttgtacaagcctgcaatcccaccaacaatggaggagtgttcctctttctccacatcctcgccagcatctgctgtcacctgaatttttgatcttagccattctcactggtgtgaggtggaatctcagggttgttttgatttgcatttccctgatgattaaggatgttgaacattttttcaggtgcttctctgccattcggtattcctcaggtgagaattctttgttcagttctgagccccattttttaagggggttatttgattttctgaggtccaccttcttgagttctttatatatgttggatattagtcccctatctgatttaggataggtaaagatcctttcccagtctgttggtggtctttttgtcttatagacagtgtcttttgccttgcagaaactttggagtttcattaggtcccatttgtcaattctcgatcttacagcacaagccattgctgttctgttcaggaatttttcccctgtgcccatatcttcaaggcttttccccactttctcctctataagtttcagtgtctctggttttatgtgaagttccttgatccacttagatttgaccttagtacaaggagataagtatggatcgattcgcattcttctacatgataacaaccagttgtgccagcaccaattgttgaaaatgctgtctttcttccactggatggttttggctcccttgtcgaagatcaagtgaccataggtgtgtgggttcatttctgggtcttcaattctattccattggtccacttgtctgtctctataccagtaccatgcagtttttatcacaattgctctgtagtaaagctttaggtcaggcatggtgattccaccagaggttcttttatccttgagaagagtttttgctatcctcggttttttgttattccagatgaatttgcaaattgttccttctaattcgttgaagaattgagttggaattttaatggggattgcattgaatctgtagattgcttttggcaagatagccatttttacaatgttggtcctgccaatccatgagcatgggagatctttccatcttctgagatcttctttaatttctttcttcagggacttgaagtttttatcatacagatctttcacttccttcgttagagtcacgccgagatattttatattatttgtggctattgagaagggtgttgtttccctaatttctttctcagcctgtttattctttgtgtagagaaaggccattgacttgtttgagttaattttatatccagctacttcaccgaagctgtttatcaggtttaggagttctctgttggaatttttagggtcacttatatatactatcatatcatctgcaaaaagtgatattttgacttcctcttttccaatttgtatccccttgatctccttttgttgtcgaattgctctggctaatacttcaagtactatgttgaaaaggtagggagaaagtgggcagccttgtctagtccctgattttagtgggattgcttccagcttctctccatttactttgatgttggctactggtttgctgtagattgcttttatcatgtttaggtattggccttgaattcctgatctttccagaacttttatcatgaatgggtgttggatcttgtcaaatgctttttctgcatctaacgagatgatcatgtggtttttgtctttgagtttgtttatataatggattacattgatggattttcgtatattaaaccatccctgcatccctggaataaaacctacttggtcaggatggatgattgctttaatgtgttcttggattcggttagcgagaattttattaagaatttttgcatcgatgttcataagagaaattggtctgaagttctctatctttgttggatctttctgtggtttaggtatcagagtaatagtggcttcataaaatgagttgggtagaataccttctacttctatcttgtgaaaaagtttgtgcagaactggagttagatcttctttgaaggtctgatagaactctgcactaaacccgtctggtcctgggctctttttggctgggagactattaataactgcttctatttctttaggggatatgggactgtttagaaggtcaacttgatcctgattcaactttggtacctggtatctgtccagaaatttgtccatttcgtccaggttttccagttttgttgagtatagccttttgtagaaggatctgatggtgttttggatttcttcaggatctgttgttatgtctcccttttcatttctgattttgttaattaggattttgtccctgtgtcctttagtgagtctagctaagggtttatctatcttgttgattttctcaaagaaccaactcctcgtttggttaattctttgaatagttcttcttgtttccacttggttgatttcacccctgagtttgattatttcctgccgtctactcctcttgggtgaatttgcttcctttttttctagagcttttagatgtgttgtcaagctgctagtatgtgctctctcccgttttttcttgaaggcactcatagctatgagtttccctcttagaaatgctttcattgtgtcccaaaggtttgggtacgttgtggcttcattttcattaaactctaaaaagtctttaatttctttctttattccttccttgaccaaggtatcattgagaagagtgttgttcagtttccatgtgaatgttggctttctgttatttattttgttattgaagatcagccttagtgcatggtgatctgataggatacatgggacaatttcaatatttttgaatctgttgaggcctgatttgtgacctattatgtggtcaattttggagaaggtaccatgaggtgctgagaagaaggtatatccttttgttttaggataaaatgttctgtagatatctgtcagatccatttgtttcatcacttctgttagtttcagtgtgtccctgtttagtttctgtttccatgatctgtccattggtgaaagtggtgtgttgaagtctcccactattattgtgtgaggcgcaatgtgtgctttgagctttactaaagtttctttagtgaatgtggctgctcttgtatttggagcatagatattcagaattgagagttcctcttggaggattttacctttgatgagaatgaagtgtccctccttgtcttttttgatgactttgggttggaagtcaatcttatcagatattaggatggctactcctgcttgtttcttcataccatttgcttggaaaattgttttccagcctttcattctgaggtagtgtctatctttttctctgagatgagtttcctgtaagcagcaaaatgttgggtcttgtttgtgtagccagtttgttagtctatgtctttttattggcgagttgagaccattgatgttaagagatattaaggaaaagtaattgttgcttcctgttattttagttgttaaaggtggcattctgttcttgtggctgtcttcttttaggtttgttgagggattaccttcttgttttttctagggcgttgttcccgttcttgtattggtttttttctgttattatcctttgaagggctggattcgtggagagataatgcgtgaatttggttttgtcgtggaatactttggtttctccctctatgataattgagagtttggctgggtatagtagcctgggctgcagtttgtgttctcttagtgtctgtataacatctgtccaggctcttctggctttcatagtctctggtgaaaaatctggtgtaattctgataggcttgcctttatatgttacttgacctttttcccttactgcttttagtattctatctttatttagtgcatttgatgttctgattattatgtgtcggggggaatttcttttctggtccagtctatttggagttctgtaggcttcttgtatgttcatatgcatctcattctttagatttgggaagttttcttcaataattttgttgaagatgtttgctggacctttgagttgaaaatcttcattctcatccactcctattatccgtacgtttggtcttcttattgtgtcctggatttcctggatattttgagttaggatctttttgcattttccattttctttgattgttgtgccgatgttctctatggaatcttctgcacctgagattctctcttccatctcttgtattctgttgctgatgctcaaatctatggttccagatttctttcctagggtttctatctctagtgttgcctcgctttgagttttctttattgtgtctacttccctttttaggtctagtatggttttgttcatttccatcacctgtttgtatgttttttcctctttttctgtaaggatttctacctgtttgattgtgttttcctgtttttctttaaggacttgtaactctttagcagtgttctcctgtatttctttaagtgatttattaaagtccttcttgatgtcctctaccatcatcatgagatatgcttttaaatctaggtctaggttctcaggtgtgttggggttccctggactgggcgaagtgggtgtgctgggttctggtgatggtgagtggtcttggttcctgttagtaagattcctccgtttacctttcgccatctggtaatctctggagttagtagttatagttgactctgtttagagattgttcttctggtgattctgttaccgtctatcagcagacctgggagacagattctctcctctgagtttcagtgctcagagcactctctgctggcaagctctcttacagggaaggtgcgcagatatcttgtatttggacctcctcctggccgaagaagaaggcccaaaacaggacctttctcagacaccgtgttgctttggcagttcccaggtggtacagactctcacctaagcagactaaattcctaagttccttggagtcccgggaccaagatggcgaccgctgctgctgtggcttaggccgcctctccagcggggtgggcacctgtcctccggtccggaaggtggccggctgtccccggcccacacagggtgctgcctcagcgcctctgtgcttctgcctgttccagaggctgtcaggttctctggcgcaccctctcacctgttcagactaatttcctaagttcggcgggtcccggaccaagatggcgaccgctgctgctgtggcttaggtcgcctccccagccgggcgggcacctgtcctccggtccggaaggtggccggctgtccccggcccacacagggtgctgcctcagcccctctgtgcttctgcctgttccagaggctgtcaggttctctggcgcaccctctcacctgttcagactaatttcctaagttcggcgggtcccggaccaagatggcgaccaactctaggattttaaaacagagtcttttggctgctcccggacatttagaggggcacatccaagggcacgcagaggagtcgtgtctggaagccaggcacaatcaatctagtgctgcccaccgcacacacagatgagagcaactcgaatcctgctgtcctgaatcctaatctttagaatgaacacaaggaactgagccaaactactacctagttgcctcagaaaaagcatattttgtgagttttatgaaaatactgcagttgtctaaaaaaagcaccgcagccatctaaaggaagcagagatagcctgcgagttttcaggcccatcagtttagagtggagtggcctctgctcacttcctcctctttcctgccagacatccagacaatggaagaatttacacagctgggggagcagaggcaaagccaaaaccagaattctaggggagggcagaagagtactaagacaacatctgggggcatttaaaacagtgaagtcagttctaacttatttctgacttgttaaaaacaaacaaacaaacaaacaaacaagccctaatgtagcatgtcaaatgtccagaggagcaattttctttaggtcagttaagtgcaacctggagctcaggcctctaagagtttcagatgaagagaaaacaacaaccactaccttgttcgctgtgtttctacaaggcagcgccgttaggtacagcgtagccccaacacagttgctacgcctgagccagagcacacggaaccactcctgggccagaggggcccgctggccagacagacttagcaaaccttccggactccaagaatctggctactgaggtttcagctgtacccggaggcaggggatgggagttctcagcagctgagctgtccccctccagcagggactaaggcattttcagcagcccgggcgtggccctctattgaacaggactgttccttgttaatactgcggctttaccttgacaagctccagtgcggatgttgggaatgaagccgcggcggcaggggtgaggctgggcaggacacatctcacaggggtggccccaggctcggcccacggtggcacagcaaagtgttttggtgcagacaatcccgctgagctgtccctggcacatctggttgcttaccacagtaaaacatgggcctgttctgtaatctgaaagtaaagaataagagattcgtcaaatctcagaggagaaagggccggcagctgtgccccatcctgcaggtccaagttcagacaagaacttccagcagctcccacatccttggctctgtgtaaagtctgaatagacctttccacccctaacttccattttcctcacctacaaaggaggggaaaacattggttcctgtccattcaaagatgcccttgttaggatcagataaatttagggaaattccttataagcctgaatgttgagggaaacacagcatcctggcattactatccaatcagttggtctagaaaacacctaggtatctgtattgcaccagactttcatgtaccattgtatttcagtggcatgaaattcatgtgtcaaaggaacatatgaactccatggtcattgctattgtccataattgctaagaatggaagctacccgtgtgtctgtcagctaatgaatgaactgtggtaggtatgttccactaagtattagtcagtcatgaaaaagatagaatcccaccatttgaaatcagcggggtttttgattaacgataaattaattagggaagcacagagaggcaagtgccacagcctgtcattccaaggtggggttttaaacgttaccaggcagaagttgcgagtagaaagaacagtggttcctaaaagcaaacagggcgaaggaagggctggggagaggttatcgctgagtacctgttagtcagcacaatggttgactgcagatagcactaatggaacgtgcgtttccaaagctagagaagagtacactgaaagttctgtcaaagaaaaatgctaaatgaagcagacatgtttagactgatttaatatttgattcatgtgtgtgcatctgcatgtgtgtgtgtgtgtgcgtgctcgcgcttttaaggggacactctcatgccacggcatgcatgtagaggtcagagttgtgggcatcttccaccatgcccatccctggtcaaacctaggcttggcggcaggtacctttgtgactgagaccccacatccccggtctaagcaggcacaccacttcactgtgagtacatattgtactctactggcttttcattttttaaattaaaaaaagatttaaaataatttaaaaataattttgcctatagttggattttaggcagaccatgatactttatataatgtgctggattgtttcaaagcttgccatcttcaatcaataggttctaagttttacaagggattaaaaagtaacaattatctactgactaaaatctcagccttcattttgttctcccaaaaaaaagaagtcactgaactctggggttgaatgccacaatatcactcatatacaataactatggagacaaaatgggaaatggaagtcatctttacaaacatggccccatgaacatttaataagtacttatctattttatttatcattttaaacattagcatacaaattaatgggtttcatagcaggatttccatacattcatattgtatttcccctttattccattaccatttttgttcttattcatatataagtaaatgaaatatacatatatgcatatatttgaatatatgtatgtatatgttgaaaaatccacattctacatctgagagaaagtatgcaatagttgagtctacgttattttgctgtcataagatctccagctccattcattttcctgaaaatgacataattttgttcttatggctgaatgacaccttactgttcatagatatcacatttgtcgattcctaagctgcttctataacaggccattttggtgccccaacaagcaagatgtgcaggtgtctctcagtgtgctcacttagacctttggggatatgtgcccaggagtggcagggctggatgctctatgctgagtttgacaaggcagcagcacaaccatttccatagtgactgcattcactgacattcccgccagcagtgaaaaaacatcccttccctccccatcctcaccaggtatttgtggctttctgtttcctattctgactgggttgagacagaatttcagcattgtagtttagaactgctttttgctggtggctaaagaatatgtatttcttcacttatatatactatcatatcacctgcaaaaagtgatattttgacttcatctttttatcaattgcatgacttggcatttttgacatttagttcttttaattctttatatattatggatatcaatttcctgcaggctgtctcttgactcgactaatttttcttttattattcaatattttatcatgtacttttattcaagatgaagaaagtactttagacaatcaggaaaaggcaatgagacataaataaatctaactgtatacaaactattatatatgattacattatacataatcgaccatgtgtgtgtcacttaaaccacaacataatgataacatgattataatcttgtttgcaagatagaatcttggtttctttcagcaaatgttacccaaaatattcccccaagtaattaaatactattccaaaatatgagttttagtgttgcctagttttcatcaagctatgatgtaatttattcaatcatttttttactgtgtatcatcgaactcacttccaattcttcattattatgcatatcattcaatgtgttcagctcatgcaacaaccatcaagatttgtctcactttcagtatcttaaaccaaggccagagtcatacaatattcctatgcaatggaacaaggcagaatatagcctcgtctcttttctgctaatttactaaggcaagtacaaatgctttagcatgccattctcaatattgtttgaaaagcataaaggaatgtggattttaaccaatgagtttccctttatcactgcttggatctgtgctcattttaataatatcctatggagtatcatatgcatgagtggtggaagaattcagagtaacatgaacatggtgtttgtgggtagaaccagcaaacatcaggaatatcacatgatgccaagaaaggccaattcaactatgcataacactgactctggacctggggtgtgaatgcctggctagaatctcttcacacacatacacacacacacacacacacacacacacacacacacacacacatccaaaaacccagaaacttcacaacttttccagggtcaaaatgaaacattgaaacccatggagcagagaggacacttgttaatttccacaatacccattaggcaactatagaacacagggacttatcttcagtattatagtggatacttggcaaatagctcgagtgcacagaatagaatctatagacttcacacacgtctacactagaaactgacagccacagatgaagtaattttggaatcaacttagaagttgtttgcttgacagcgcctgttggcaagcgtacttgagatccatactttctgggaaaatggatgactacagagaaggtagcgtaatctgggggaaatgcaattgcaaatagaaatctcttgaaaggcaaatgatgtattagcagggctttaaaatgtcattctgatttggcagcttgtggtttttagtaagttctgtttagtaagtttagcttagctgtgttctttagtaagttttaaaagttaaccctgttcctactcaatattccaaccacagaagaactttacctacactcccaattctttaccaacaatctaattatgtataactctttccatggctcctatgtgatactaagctaaatttacaactcttttaatatttcttcacatataggccagtggtaggaagagactgtctcacggacgctgttggattcaacagaagttattattcgtaatgaagtagagcatggtattagaaagattttctatttgcaaatctctctaaaactacttccttataagagcttcaacaactagggcacctggccaactcttccaaagttgggtttgctttgttttttttttttttaagttaaaatgcaagattcgtttgtatcaactggtttccctcacttctgggacatcttgcctctctgcggtcctttgtgagtgggtaacacaagggctgcttgaccgttagtttgccctctaagattgagaggcttttgttctgttgctttaattttgtcccactagaaagaaggtccagaggttaaaagcacgtaccgctcttgcagaggacctaagttcacttcccagcacccaagtcacatgctcaaataatctgcaacgccagctccaggggcatctgataccttgggtctcagcagatgcctgcactcgtgggcatataccccccacccacacacatacacaaacctacacttaaaaataattttaaactgtattagatttattgaagaagggggatatggtgtgtgtgtgtcaccatgcacacaagtagaggtaggggacatattatgggaactgtttctcttcaactaccatgtggttcctagagactgaactcagctcatcagacttggtgacaagcaccttttcctatgaagccacctcatctaggctgaagttcaggccatacagctgtggtcctggatgctgagctcactcccacatctgcagctcagaccgcttggactgtagagttggttctcttgccttcataaccagacttcaccctgacacagactcatcacttacaggcagagtgctcctgcggtcagtaaattcttgtcgctcttgcccagccactgaaccgcaagctgcagagattcagagggatgtaattttgggtactagactccaattatttaaaacccttcctttcatacaattacatatagaagattaagatatcaatttattcatgtcagagaaagtcagaccagtcatgttcttcccaagaaagctgaccaatagaattttaattcatcctcagagggaggagttcagaaagcttcgaaaggaaaccaaaagggggaattctcaggactgtaagcagaagcagccttgtggctgcttttgctatgtcttgttcctgtcacttaccctgggcttctgtgaaatactggtgactagagccctgcccctatcccaaccagcctcgccatggactcattctacaggtgtgtcatgcaatattctatcattcaacagatgttcagtagtagatcaatattaaaacgaaacattcttctgcgagccttttggatctctctgaccaacaagtcctaaggaagtatcccatatttggcactggaattgttcttggttgaccactagaacttaatggtaagatcttattgctgaagacaccacacagcttgcttagaagacagagggaaatcaggctgaaactgaactagaaacgtcctcactaatggctgtggctgccttactatgatgttacacacaaggctaccaggggtgagggggaatcaccaacaatcttgcccaggtgtgcacgcccccgctctgacactaacctgccaggtaagatgtgttcactggtgcaatagctgcttgactgtggtggtgacaaccaagtgctttctgattggatctgaggcccactccacaggagggatctcatgcctagagctatggaccaggtcaaaggaggtcacaggcctaaggggatgaatctgctgctttccttttcaaaaccatcatgttgtcaaactgtcctctaaacatttctgtttatatccttaggaaaccttgatcagagaggctgcttttctgcagcaatgactgcagaggtccacagctggtcaaggtgctgagaacaaatgagtgttctcggttccaagaatatctgtgtcaccccttcaaggctcagaaacatctggaaagagggtctggaaagaatgtaagggccagatgatagaggggaggattgtgaaacaccattgtctgggaaggatgtggccagtgcaatcttgttctcacggcaactgcaattgcttgctctgggcctgcagaggactaggcctatcactaggggagggtttcatggaacctagccgctctctgagaaaccacgcacactgacagttcctgagggagtagaatcattgtcttcagtggtgaagccactggcaagttcaccatgctccagtggttggctcaacaccacaccctcatgaccagcccacataacaaaattttaaaaaaaggacataaaaaaatgaaagaaagacttttaagagaggggttgacagtgttgagagagagataatcgagggtggacagatgatgcaagcagaatgcactacacgcatgtataggactgtcaaaaatacatttaacttaaaacaggatttctggagatggttgcctcacaaggggaatttactgaaagccaccaaatggcctgtctaaaatagtcacagtgataagttttattttatgtgcatattagaataagaaaaacaattgtactgtatacacaaaagcatcttttaatctcagtgcttagttctaaggagtcaacctaagaatcgggggcttagttcttcattcaacaacctttaaggagtagctatgctgtatcaatgaggagtgcagcaaaatccctgcacacatggagtttacaatctactataggagatggtcaataaataaataaataaattaattaattaaaataatgtcagagccagtaagactggtaaaaaaaaaagacttattgtgtatacctagtgaccagagttcaactcctggagcacacataaaggtggaggaaaatcaactccatgagcttgtccctcaacttcctcatgcgtaccacggcacacgcacccctccacacacatacacgtacatattatatgtgcacgtacatgtgcacatacaaaacaacagtgaacaaaataaatctaaacattaaacattaaataaaacttcatatatgaagttgtgatttagtctacaaataactcctacaggcatggcaagatgatggaagaagactgagacaaaatgacaaaggaacaggttggtggttgacaacaagatggacacagtgtagcacaggcatcccgggcactggcaacaaggagagtggcggtctgagctgggaggttgcctggcttcacacgtgataagaggctgtttgccaaggacacatgctaaggagacactgtgctggcaccttggtagggactgaatttcacaggaggccccaggccacagtcaggagtttagacttatctctaagttagcagaaagtcaccatcaggcattcctttaaaggagggctaccgagtgggctcccctggggagacaggaggcttttcaaggtgcctattaaaggacttggggtagaagtctgcagtagcttggccactgacatgtaagaaggagggaaggctatggatggcagatggtcttggtgagcgggaccagcaaggctgcacgtggattggaagtgaaggatgagagaaaccaaagtcagagaccccggccttccagctcatttattaaaatggaggaactgggacgctgggctctgctaaacgcaagtattaaaagttgtgcacttttgcaacaaaggagctattgtaggacaggtgattatagctgagaaggccgggcccaagtgaaaggacgaagtatgtaaatcctaaatacaaccttcttaaatcctagcttgacccatatactttaatttacttttcatcttttccttttttgtaaataagcatttgctcatatcatagataaatgtttgagtggttgaggcattcttaaaatgcatttggccatttctcaccgaaacctgagtattaagtatagaccaacgttatgtgatgggatcctggcgtgggggggggggatggaatcctggagggggggagggggggtggctgcttcctgagcaattccactgccgctttcagcatgacaggcacgggaatccaagaccactagtgtgtgagcggccagcctggtgctcattccatggtaaatggatacataacacattcccatgatgtcatcaatcctgagaggtctcatagaaaacgggaagcaaggatgaatgttcagccattgccaactgtatctgagaaatgtctcacatcaatccggactttctgtaatatcgagccagaccaacggctgtgagatcgtttacatataccagttggcaagtaatagttcttgagctggccttttaccaaatatgcacttgcttgtggagtttataaatctctctctctctctctctgtctctctctgtgtgtctctttgtctctctctctccctctctctctgtctctctctgtgtgtctctttgtctctctctgtctctctctctgtctctctctctgtgtctctctctctgtctctctcctatctcgtcctccctccctcacactcactctctccttcctttcttccctctcactccctccctcctcctctctctctcataaatatactatcaagtaactctcaaagcagcttcattcatctcagaacttttcttgggaagtcaatgtcagatgaagaaaagttcctgacactgtttccagctcagggtctggtgctgaaagtgggagaaagacaagtctgaaaaaactactgcagcactcaggacccctgagtaacctccggggaggagggattggctgtagaagggaagggacaagcaacaggcttgactggaagcgactgcatccagagatacagatccaagtagctgaaaagaaaaatctccactgcccaaacactgaaaatctgatctgaatagagatctgcttatgctcaggtattaaaatttgatacatgcatgttctgggtgcactggaagccccgaagttggtgctggtgttgctccacatttaaaagctggtgctgtgtcacggtctctgtgagacctcattagaaacaaacaaattttgacttagctgtaagggactgctattttaacacaaaagctacacaatgtaccctgccctttagaatgggtcactgtgtcacagacaccacaggcaaataatcagaaggcagtgacaataaatgacaaagacagataggccatggcgtgtagctgagaaacttctggaagtgacaccacaggagaaaagtgaatatggttagaaagtaatgggagaccctattgaaagtggtctaatgtacaccaaggaacaggtggaagaccataactctgcttatgggagagtttggctttctggtatattaatgggtctacactgaataccttttggataattgtgaagcacatcaatagctaacattgaaagttccaaagctctacagttagaagtgtaccattgtgtacattgcaattataattccatgagcttcccatttgctgtcctgggacatccctctctcttgaggtattctagtcagggtctccacagctcagccttcttatgctcagaattcacagcttctggaggcagcaagtactttcatggtatatgtctgtgcaaacactctgtcctaagctctaccttcagtcttcattacacgttttatgggtaaaaagtagtactattgggctatcagcatcaattttgtgcagtcacggagctgttactcaaagatcataagcgggaattctgggatctggagtaagccataaaatcatgcacaagtttgatagctctgaggacaggtggacagccacatgctctttctagaactttagggttagtgtcaactgctgttcatccctgcaggtgttctgggactttgggagtcagacagcatccgttgtgtggggtggcaacgcctctgtatgatgaaagggaaggtgtggcaggtgtgaaggaggggaggggacagggcacccacagctcagacagcctacaagtgcattccctcccaccttagtccagtcccaagcaatgtcctgctgtacacctgcttttgaattacataggaaacagtgcatcccgcatttctggatacaaattctttctgcttaagcttgtttccttacttgcagctggcaaaatgtgacctaagacagtgggtactcttttgggttgagtacagtttaatcagactctcagttccccacagttcaacagtgggataaatacaactccccagtatttaataaaaagcagttaagagaagggaccacctaggtagatgcccaggtttattggagagaagtttctttttcttcagtctcaaagaaaatgtaagatattaattaattagttaattaattaattaattaaacaaataagtctctcagttaggaacatatgcactctgtttctctgatttataaccaaaggaggccacacagacagaaacaaacttacttgagtgttaccacaggcaactcaactgctgacctcagaaatgtacactgactggtttttcaagggtagcaggtgagttctgggggtttcacttagccaacggatgccataagaaaagcaagaagtggtagccactttaggaggtctgtgtgccagtctcaggtcagcttgagttagacaccccacagatctgctgggatcagagaagcaaagaggtgagctgtgggtgggtgctgtggacccttctgtgtgtctgagcaccccacagtggactgagcaccccaaagagggcagtggactggattttggggagaagctgaatcattttgtcttacagaagggacaggggatggtgggtaggaaaatggctgacgggagtgtgtgtcgtatgtttgacttcccacatatcattcattcatcatagcctagcttttctggccacagacttgggggaggtcacagtatcctccgtattccaaacttggtggcccactcaccctccctcttttgtaaactactagtgatggccaggtagcccttttctgtcacctgcagaaggatgtagctggcatcggagtctgaggtacctgctggaagctcctcccacttcagctctggcttcttccctaatttgcagccactgtccagagatactgggtaaacagtgattcctcaactcatgtggccatttctttctacccatgggtctttgcacatgcctcctctcctttctactctccattttctagaaaattccttctcctgggggatttctttgactactttcttctccatgctctgtggcactgataaaactatgggaatcattcgggaataaaattgccttttaccaagccatgagccttgagaataagtaccctgtcttactaaactatgtatcttcagtgccaagagtagttttcacgctcacaaaagacacaagtgaacaacctagcaaacaaaagcaaaggactaaagatctatttttaatttagtctaaatcacccaattttgtgcattattctcttcctttagtcagggtacaactaacaatccatgatccatcctggttatcactcagcatcactgaggctgggaacaaaactagtcttcacatcgttgcctctgcctcctgagctagtaagtgacactatatatataaaaaactgacacacttcctggctcatccaccttctttctccccaaattcatcatccacagaccctgtcagtcttatgactagatgatgacaccaactcaaactccaaggagactcacaccctctgctctattctacaagaatggttgtaagcaacccttccactcttgcttggtcctctcatgtctgaaacagttgaaaattttgaaatagagtaaaaataaaagtaccactgattctgattggattcaagactgactccacaggaggcaacccacacccagcactgtaaatctgatcaaaaaacacactggtaaaggtcacacataccccatccccagggaaactggaacactgtcatttagttaatatgacttagtatcaaacaacctactaaacatttacattgattctcacagacaaagagcaccctcagcctttttcagtgagcaaggagatagatgctccacacgcaaacaaccctttctccctggctgccttccagttaggaatggacttttcccagaacaggccaataagatgcaagcagaagtctaagaagagacaactgaggaatgtttttcactctctgataaagtgagataagtcggtctgtatcccctgccctcatctctctcatctttctagaagatacgatgcctgggggtacactgccaacttgcaggcatgagcacaaatgttcacatacttggccggtgaacagaaagaagcatccaggtccttgatggcatttctgaagacctagaccacccccagctgcccttcatctcctggtactcctcctcttccctccctctctccctctgtccctcactcttcttcctttccctcattacttctctccttctccttttcttctccctttctctccctctcctcctcttttccctctccctcctcccttcctttctatctctctctttctctctctctctcccccttttctcctccttccccttcctccttcctccactacatttctgtctaagtaccattctgtttttgaaaataaacattgtaatatcttaggaagataatcacatttgtttattctattttctaaaatagtttagatatttgagtgtgatatacctttaaactgccctcagttgaaaaaaattttaaagtaaacattgggtttccaaatattatgcacataacttggtaccattcaatcacaaggacatgaacaaatacagaggagatactgaaaatactgaagcaccagagctattccccagtgcccaagttcaagctgtccatcagcaggaatggattaagaagagaacaaatgactatgtaaatgtcttcagacattcatgtgctgggaagtcatgtcaccaaaaggtacccgttaccattgcaggaacatggagaaatatttagtcattaaatagggtgacagatacttcacataagcacagataactcatgaaacaaacatacaaaatccaaactcttagctatggtggtggagtgtgtgtgtgtgtgtgtgtgtgtgtgtgtgtgtgtgtgtgtgtgtgcacgcgcacgtgtgtgctgttggattttctctccatttcttctcttcactctgagtgtgagaggaccaattccccttggatcccagatgctgttattaatttgaaagcttcatccagatctctgaagaccttctgatgagaagtctgactggagagaattcctgaggcctttaagacaggaaatgccataattacgagctgtgtgtgcttccaatgtttatgtataaaatgagttttggatcctgtcactttagaattggagcagcacagaagaaggagaagaaaacggacacacaatgtttatggtgctggctgctcacttagctctcacaatccatggagggagacttacccaattttacaaaagaggaaactgaggctcaggagttacactgaagaacctgcccaaggctatacagagagtaagtaccaggattgaacagcagatctcggaactaaagcaatgctatgtaaatcaggcagctcggtcataacctaaatgttcagctacatttaaactcctagtgcagtgacagctgttgtctttatgacgtgtaaactatcccaattttgctttattagatgtattgaccttgagccatgagaacacagaatcacttcggatgtcatctaaaaatggtttgtgttgaaacatgtgacagaggggacagctggggatgcattggagaagcgcaagtgcaagccctaatgttttagagcttaagttggttcatcttattattattgtatttctaatatatggagtatattttaatgtcataccacgtactgtaacacaaacaaaaatagtaagaaacatacatgcaaacacaaaacataagcaacacacagagaaacacatctgtgtgccgccagcgatggaaacagaaacatcttttgtacctgtgtgactgtgggcaaaccctttcctccctgaccacaggttttcttaaataaggatgacagtgggatatctgtcagaattatatgaggcaatgtactgaaatgttaaatgtaggtcttgctcttgcacaccatcatactatgaacagaatcctttgcctaagacatctcacttgattgatttctgagacatcagatagaactggttaactaacatactgttctactataaagtcagattaaaaagtatgtagcataacctactaaaacatggtaagtaataaggatgtacaaaatttgtacactgtatctgtaagcctttattctcctttccccttctctcatgttctctccttgatccaagactgaaatgccacactgcaaagtctttgtcaactgggttgcttgttactgaggaacacaactcagtcatagcttctagagtgataatctacacctacaaactcactcggccacgaccacacagggcagctatccgggccagcagagtctggctcgggcattgtttatatcacctatgaatatatctggcttgcctcattccagaattcccttctctcttccaaatcctttttatccttcaagactaaatttaaacattacattttgggagcaacctgtttaacctgatgctccagggagatgaagctttcattttcttagcttccatgttgtccaatgcacatgaacctatgcacagagccataacattttcccttgtggtacaaagacaaggctataggtcacagcctcctgggtaccaaactccctaaagagagagagcctattgtctatctcttttccttgctctccatctgccaggaacaagagacattcaataaatgtttgctgaatcaaacatttattaatgagatattattaacgagatgcagaattaattcttgcatccatttggtccatttataactaccaacaactacacacattccatagatgagttcatgtgaagttaattagacaagttagttaagtctccagcccagcaggttattagaactgaatgtccccagtgctcctgagggcaaaggtaaacaagctttgccttctacgtgtttaatgagggtttctggaggaagctttgtgctctgatctggggagtaagaaaattctacatttaacagcttttgtaaagtactaacatgtctctcctacacagtttccttccatctctaagacagttttgctcaatgcaacagcagagggtgagctgttatctgtgaatgtagttctcctttcatggatcacatcagtgcacaattccatcacttaagacaggagaccaaggcaagtgcagtaagcatcagagactatgcctgtctttctaagatgctctagaagagacctctgagactccctttcgatgaccatccattcataaggtgaagccaacatgaagcaatgcctagaggaagggacttaaaggggagcttcaactacgtcagctgcaaattccagccagtgacagccaaatatgagcaggaaagctttcataggctgagactatgtttattaagcagctctctttgatgagtgatgtacaagtcggtcagaagcatgtgagttaagttccccctgagaggctgggtttaaaataagtggaagagtgctggctcaacccagattcagaccctctaagaatcctcaagaagccatgttctctgagaccttcacaaggctaactgacacctctgtacagagcaccagatttactgtgggcagtgcttaggctgtagatagatggatgggtggatggatgggaccagaacacagtcctatctctattagcaatgtgctactgggtcacaatagggacaagtgtatatcacagatgttccttctcaggttgtccagattgaggaaggacgtgacacataaaacacctattctcaagcacaagatttcagtgaagcctgactaagttttccacaggaaaaagcagacaacaaagtagctcagtatggaccacccacccatgagaggcaaacggagaggcatagtcaccggccctatcctacagagtttaagatgctcctcttcagtgtggacttcagagaagcaaaggctctgagacaactaagcccaagactacagggcaagggggctgtacacagactaggagactacacagaagtagccatgctctgtaggaagaggcaggagtcacgcagaaagaatatccagtgtgtggaacacaaatatctattcattcaagagtttgctaaccttaaatgaatcccttgctttcaggatctgaaagccccacagggaacatctggcccaaattatccctacagaagaaaaaccctaagctgagcagtgaaatgatttgctcaaggtcaacatggccattgaaagtcagagccgacactgaacctgacttccttacttccctgcccaggactgctctcactaactcgtgttactactttggatgggagcccgaggaactctcctgccaggtggcaacttgtttcccctccagaggagcaagggaaggggcaacggaggtgtttttttcaccttggcacacaccagagatggcgtcaagaaatccaggtttaaaccaggtcagccagcagggtttgtctatagcgcagctgagcaattgccgttccagccaggattccgtcagtacgatgggtgtgtcaccaacagagctgagctaatggtgcttaagccaagaattcattgaggagactgggagagataggtccaggctagggacaagaagggacaagaagtaggtgaagggcaaagagaaggcagtagttgactgggttcttctaaagcatctctcccagcctggggctgcactgagcacacatactgcttctgcagcacccccaggatacgtgctatctcttgatatgtatgtacttgtgagattttcacatctaaagagaacacatagccctcgatttaagtagcctgtttaaaatatactcgtcaccagcgagaattgaatttgccaaaattaaggctccacagtctaaataaacaggcttctcatatagtggctaagccacttacatatgatatcctataaaagagaattcttaatcaagctggatgcaaataataattagcacctcatagccttcttgaatttttgctccacaagagctgttaaatctttgatctgatgccattgcagactctcctgttcacacattttctgttccttcaactatttcctgttcttctatcagtttatctgaacaagggcgtttgggatgtaaagagccattgatacataggtaccattctgaacatcaattcaacttcagcactattagcacagggcttaatctcagatcatagaaattcccagaagaaacacttaaatgattagttatattccaagcagaggaaaaaacaaacaaacaaacaaacaaaccttcctgaacagatacccccttcagtgtgatgaagagcaatagaagtcagctacatcctctcacagcccagtcaagtaaagcatgagatgacttttgttaaagtgaaggctcttttggcacactgactattgcttcagatattctctacctaagaagttgagtagcattatgaaaaggttagaaaaaatcaaataaaccaggaaaatacctggctacagtatatgctaatacaaaaccataaatacaggagtagcacgcttatcagcctcagagagaaggatcaatgggaagggatatcagatgtgtattcacagcagcagagcctgtggggttgagaaggctgagtctgtttcccaggagttagttcctgccattcgcatccttggagtagtgcaggagacctgcagttgtcaggggactctgccttagtgaagaaacagtgagcctcagagaagtccgtggacattcatgtgtgcacgggcgattgacagcttcactgtcaggccgactggattcagacgcatcatggaaacacacttcagaccgtggctccgaggctgactttagaaaggttttacagagcaaagagtatcctccatggatctgggctaagtccccaaaggctggggtcccgggcagaatgtaaaggtgaattccttctaagcacctcgctgcatcctgactattgatgcgatgtgaccaacacctcagagttctgcagcagctagagccgacttcatggtcacggcatcctctcagggatgagctacaccctccaactgtttgttacataaaccattccttctttgagtcccttttctcaggtatttcttcaaagcagccagaaaaggaactagtacagtatccttatcaagaaatctcagttgcccaatttccccagaggcagctgtttgagggatatttacatccataccttttctgaaacaagcaatgctaccttttctgaagcaggtaaataaaaccacctcaccatgccgcaccaacacatgctctgtgagtgtaaggagccgaagcctcctgctatctgctttaagttactaaataccaaacgtggagctgcaggagaggcagtggagtgctgggtatttcacacccgctctctctctctctctctctctctctctctcttctcttctcttctcttctcttctcttctcttctcttctcttctcttctcttctcttctcttctcttctcttctcttctctcttctctctctccctctctctctctcttctctctctctctctctctctctctctctctctctctctctctctctctctctctctctctctggtatttcttccacaggcaacagtcttgctcctttcttaacaattgaagtcacaactatattaggcctgaggaattctgagacccctttgaaagggagctggatgcagtcttccaggctctgggcacttttgagcaggagcagggagcactccagaaagtctggctgctggaggctgggctctccccagactgaaacccaagaactctcattagaagcgtctgcctccagtgaaaggcctgccgaggacacaggcggaggacaagcagacagactcagaacgcagccagggtcccaagcaaagcacaattttacaatctgtgtgaattctgccaatgcggccaagctgcgcacctcactgtgtccatgtgaataaggaagaaaagcaaattcctctggcttcccagagcaatggagtaaatgctgagcctctgctgccaggaggtttctgcagccttcaagggcagaatggcttgcctctggcaatggagacggggatgaaacaataatagaatagcaaatgaagatgataggggaaatttcatatctaagtatcaggaaatgaatagcatgtactgaaggaggagcaccaacggatgctatccccataaagcctccttttacagacaaaggctgtcagaaggtttagaatgtccagtagatgttttcagtcacctttccctgtaagaacaaagtgtgtctagctctacttactatactacatagtgaaggtaaattttggagcctgaatgcagagagatggctttgataatggggactcaatttgcccctgtgggaaattaaaactgcctcggagatttacagggaccagcaaagttttcttctgtcatgcccatgtcttctcaagcatgaagataagacaggagtgggagcacatgtgacatgccccaacccagtacattctcctccttaatgacccaactctgccacctataagtcaaatagtgtcttcctcagaaggcatcataggggttaggttgtaggggttaggtgtagtcatatatagcagctgctaccactagccttcagacactccatgatcggcagttccaaggtgtgagaaggaccatacaggggtacagcaatgaacttcgttttttagggtctttttcccatcaaagggtactatcagtaagcaagagtttcaaacaaaagttactattagggctgggcatgctggtacatgcctttaatcccagcattcagaaagcagagacaggaagatccctgtgacttcaaagttagcctggtctacagagtgagtccaggacagccaggagactgttacacagagaaaccctgtcttgaaaaaacaaaacagaacaaaagccaccattattattgggagacagataaaataggcaaatgacattctggggaaaatagggacttccaagcttctttgtagctaagtacagaatttgtgctatgtgatataagatctgacatatttgcatactttagcatgtaagatttgtatgtatttcctagctttatgggatgctgttcttatacaatacaatttcctaacttcaaggctttgtgcttccacttctttggaatttctgtaaagggcatggaacatggctgagtcccaaatatctgtagactaagactgtaattctggaaggagccctaaagaccatgtcctgcgtgtcacagtagaaagacctcaggaagctagacatcctacccttgtgtgagctgtcttaaaccatgttgccctcctgaccacacctcttcatcccaacaagggagatgaccgcacactgcccactcccagagctgctttgagggtcacttaatacagtgtgttcacaacagactgcaacagaagggcagggagtgcccacagcctggagaactatatctggaaagaattcaaggatttttttccaaggtcacccaagactctagtgcagcctagtagaagtcagattactaaatatagacaacatacagtgtaaggcccactttcttggaaattaaaaaatgtttaattttatacatgctggatgacttttctattgcttttcaaccgtattgagtatgtggggttatgccggcatggcagagtgaaagtggacctgattagaaagtttctttggagcaactcccttctgtgtcatctggaaattggcagttcagttcacaggttagcagtggcagctcgatccactctcaaacacttcacagatacaccagcagtccgatttggtagagctgggatagcaaacaccaatcagcagaggtggtaatatctagcagagacagccaggcctcagccttggcaggagtcagcaggagggaccaggaggaacgccaggagaagttctcggctgtgcctctctaagtgaagtgaagcatcgcacagctagctcaataagcaagtctagcttagcctccatcactgtctgctcagcctccatcactggccactgagtcctttttatatgccctccaaacatcacatgtcctccacaagtcctgctcagcttgtgtcttgcacgtggggctgtctcagcctacatcactctgccaagtccacagaagcagcaaaaatccaaggcacaccaccagaaattttttggcctgtttctctctaaggagtcccaacaaatagagctcaactatacagtgtaaggcggaccaatacattagtattgttagcaaagaatccttcatcctgtgtcttttcacgtgcttgcttcagcagagcatcctttctcctgcgtctgcctcagtcaaacactccttcatgtgtttgtcccagcaaaacaccatccaacacaacggactttccagagaactcttaagtttccacttcaccctgtcatggaaactggagtttttaacgaaacatttaaactccggaactcagtacccagctttgcagtttatagcacaaacaagactctcaataacaacttgagggacagacgaacgaaaggacaaatgtgggtgaaccaagaaaatatttactcctcatgttcttgtcaagaacttgttatgaaccagacatttctggttttgtctggtttgttttcaattttctttttttacagttagtccttgacagtttgatacatgtcaataatgtagtctgttcactccccgatccatttttccttcctcttatctctcttatcttctctcccttcctcctctacctttcctacatccacgactttgattttgttttatgacccacttgctctaaccagggccctctgtgtgaccattggattggaatgatccgtcggagcctggtggggtcacacatgggtactcaacttgaggcaaccactccttcttaccctagatccatcagtagaaaatggctcagcagtaggggtagggcccctgaacccctcccccatccgtgcctgactgcagacccagtactgtgcattcctgatgcaatggctatcttgcccagaagaagggcactacccagccctcctccctttcttccagctatgaccatcattctgccccctcttctacaatgttccctgaacatggaggaaacagcgtaaatgtcatgtttaggactaagcactcatgggtcacatattctcagggtctgcttttctgctttctgccaagagctattttaggcactgaaaatactttacaaacaaaagcatcgggtaactagctctttccctcttcctcttcctccgcctcttcctcctcctcttcctcttccattccctcccctatgaatgtaagtgtagctatgccatggtgccttcggaagtcagaagacaaccttggatgatgtccattcaccttgtttggaacagggtctcagtgtttgcttctgtgtgtactaggctagctgacccaaaccttcagacattctctctgcctgccacctcttcatggcaatgcactactatcagacatgagctacagtgtctggcttttgggagggttcagttcagaaggcttgagcaggaagcaggtagccattgatccaggctacctcctgcttttctcattttaaagagaaaactaatttgggagaaatatttttgcaataaggttatgtggtgaccttggactgggggacaacattaaaaatgatgatgagagaaatgaagggcttatgatacctaaattaatgaatgagtgtcttgtgaggaggattaattacttcccataaacctgctatcctggagagagagtaaggaggcggcttctgtaaagttggttttgaacgaactatttcaaaaccatattccactagttaaaccgtggtaaagctgccaaatggctcaagttccaactacctactcattcctaaaacatgtataaaattaaacattttttaatttccaagaaagtgggccttacactgtatgttgtctatatttagtaatctgacttctactaggctgcaaatgcatgcttcacccagatttgatgctctctccttgtgacatgtatatgacacctccttctcttcagctgtctttcatgcatatgacacactctgtcctttcaccctctctccccttcttgtctgcagaggttaatatgaacatcagataatccatgtctcctctgcttgcaaaggactattggagggagggagggagggaggaagggaaggagagagagagagagagagagagagagagagagagagagagagcaagaaagagaccttagaccttagaatcaagcatattcttaaatcacatatacttcatgatacggattaattctgatatatttctcttaaggaatagtcagcaaggaggactgtgaaatggcacttggcttctctagtatgccagctatgttaacagtgctccaaatctagagcggccagtgggagagtgccatgaacactctaacttgcccttactctttctaagcatctggatccctttatatgctatagcgtatcggtgggtggtctggaaattctaggggaaggtaataacttttggtctgggaggcggaatgcagaatgctacaggctggtgctgtaactgcttcgatgtggaacctgaaactctccatcaggccgactttccccacccatcctcatcctcatcacagacgccagctccaccctgccactcagtgagcaactaagaaggctatttatggaacacaattagtggctggacagcatcctgggcaagcagatcaataaggcaagcttactgaaatcatctcctgggtcacagaacctacttgcaatacaaaggtggaggggtttgaagtgtgatttgctgtgacatcacggagagatgctttttgactccatgccttcatctgaacggttcagatgaccccggatgtgttctttcctagttattgatttgcttccccccaaatgcttactatctattagtagcataaaaatagttaagtctaactgaccttcacatggttataagataaatatctacaaaataaaaataatacttatgcaactacaaaacaagccctaacttctcactagcccttacgttaaaactagaaatgcactcacaaagtccctaaagaaacttagcttgacaaacttctggtcactggcatttagaatcctgaaccagggcagagtagctgcaggtatgcagagacttctcagagactgcctaggtgaccatcatgcattgtggccaggctgtccaacactgactgcaataatgcatgccacagttgtgacacttcccatgcaccaagtaccaggccgaggtctctacatccacaactcaatcacccttccaggtgggaggcacagaactattacttcagacagtaatattttattgggaatagcatgttattgggcgtagcatgttccccactgagcagatttcactgtgatgatgaaccgcagcccgagctcatgggaaatagctgtctctaagtgacgtttctccctaaactcaagcagatccccaggcaaactgtaggcacacgacgtacgataagcaggtatgtggaaaattcccagagcaaaatgaacctacaattcttagagtttgaaagtcttacaaataaagccttttagttaaaaatacacaagtcctttctagaacatatacatttcttccattgccaggaagaaccacttgagacattttgagccatgtttgccctaacattaatggattccattagcacaggatacaatgcagtgttattgataaaaaataaaatggtctgggcctggagaggtggctcagtggttaagagcactgaccgctttttcagaaaatctaggttcaattccaagcacccacaaggaggcttccatctgtaacttcagttccagagcatctgttgccctctcttggcctccatacacagcaagcacatatgtggtacacagacatatatgtaagcaaaacacctgtgcatataaaattaaatattaataatagaaatgtttaaataaaaattaaaaggtctgtcataatgatcttattactaaatgaataaacaaaccctatcatataaaatgtcttgcagaaaaggcaagaataaaagaaatacaatatctttatcatttaagtaagtgttcaacacattaaattttaaaaatgagaatgctatctttctactttacaattttatgtcttcatatctctgtaccaagatagaaatgctaatggtgtgttaaatcaaaaatgtgtcttacattgaccaggtaacccagataaaataatgacacatggatatttctcttcaaagtcctaattttttttgagaaatttttaaagaaacgagatttttattttgctcatttgtgctgaggattaaccccagggccttgtctatgctcagtatgaactctgccaatgtctgcttttcagttaagatggatagcggcatgtaatagctgatttgtatgtgagtcagaaagagggtggctgagtattttaaatcttattggaagggctgagaaagggagtatggacgctcctacagtgggtaaaacagaattctgttctattacccaaagaatgtgtattcatgtgctctgtccattgtcaattcctagtcactttctctggagtctgccaagggtccccacccatccgtgcagagcctgcagcaagagcaaggtcacactcacacacgtgaaggctgggtgcacaggccccagaggtttgaacaacacagtgattcggcatttgttccattccattgcctgtatggcagtgaggggggatcttccccgtgtctcagtaaacgaaacagaatgtaaaggaaaatgacatcgttgcacattgaccagaatcctttcggtgttttctgtcaacttgaatttcataatacagacaactacttgtttccctgaagtttaagtgcagttaatgatgttttaatcagattcccaactgtaaggttgagcaagatcccacctgcttcttccagacatcaaacatggaataattcttatgccctgattgatctttctgtgttgtgctgactttggtaaagcatgttagcttgtatttgtgactgttgcaatagaaaactttgtatgtttataagaaaggaagcatgaattcagccgccttggcacgcgtgcttcagatcacagtcacacgatttggaagggatttgagagacctgcgctgttcaaacctcataatctataaattcacagttggaggcccaggaaggctaggaaccaagagaaacaactgatatttagagaattataatggttgagtagcaatataaaatccaagtgtggaggcttagcaggttaagagcacgcagtgttattctagaagacctgaattcacttcccagcactcacagcaggcagttcactaacacctttatttccacctccaggggcatttgtaactaatggcctccacaggcacccaaccgtgtgtgcacaaaccccacacagatgcatgcacataatcatatatatgattgcatttgtatacatatttattttactgtttgcattatatttcatgcccatggacctaagtatggccactggcaaggacggcagcacctagagagtgatagaccagctgaggctcaggccagatcctagacatattcacaattgcttggatggtttctgtgtacatccatgtttaaaaagcccaagtctatatccatccaatgtcaagttggttcacaggtttttgagaattatttcctgtctatgaggaagtatgtacaaaaattaaggctaaatcttcagaaggcagcatggtgatacacacacataattctcaacagttgggaaatagaaccaggagaattaggagttcaagaccattctcccctacatagcaagttcaagatcagcttggactatatgagggatgagctcacaataccaaaagacaagcaactaaacagacacacacaaaataagtctttgtatttgtatcaattggtcccagtagtttcaaacatgctaaaatctagcttatgaagggaaacctctacaagctctatttgtgtctgtttgtatgattcttcaagtgattcatttttattgaattttataaggataccagttcacaagaaattggaaattattttaatggaatttcgccaacaacacagtccttcctccctctaattggaaccatggaaaaacagctgactcacctccctacttgtctatgagctagtattatcttattgtgaaaatcagaggaagacagtgaaagaaaaactaaaattcacatcctgtgaacagagacacaaggaccctgaacacaacacaactaagtaaagaacaagacattagaagaattatttgtcataccaggcaagactcattataggaattcaaggctggtttagcaccttaagagcaaccgttatagtgtccgccatgagtggacggcaagaaaaatgtcactatcctgacagatgcagacaaagcacgcggcaaagcccagtgtccatttatgactaacttctcaacaatgagtacagagaagctaacgtgatgtgacaaaagggggcttcagtgtcacacatcatggggaaatcgaaagggctaagactgagggtcagcggggatgctgacctgtgccactgtgactgaccaccacgtttgaggttctagcctgtgggataatgaaaaaaatcacagtatacggattaggaagttagatgtgcatgtacaattctcagataaaacaatcctacagtataaaatcaattaataaataatccatcaaagttacaggatacaattataagtatttaaaaatcaatcattttatatactaacaataaaaagtttgaaataaaattctacttccagtgacatcaaaagcaataaaatttatacaggataaagttcagaaaaatgtcaagaactgcaccctaaaatttctgagaaaaatcgaagagcctttaaatacgcgatatgaaatcccatctctacagaatgggaaaggaattgctaatgtggtacttccttatagatctagtaaggcaatgactccaggtaaaaatgcctccaaaagaatgattttcacaagttgaaaaatgaagcaagattttataaataaggaaatgtagaggaacctagatggcaaaacaaacaaacatacaaacaaaaccacagtgatactggagaacttccctgagggacttgtggcagttaatggttgctgggagaggaggtatcactttcctcagtactgtaccccatactccaataaagagcccccacctatgatcgtgcaaacagcactaagctcagtgagtcacacatacacactacacacatacataccactcatgcacacaccacacatgcacacacactatacttacatacacagtacacatgtgcacacaccacacatacacacacactatacttacatacacactgcacatgtgcacacaccacacatacacacacactatacttacatacacactgcacatgtgcacacaccacacatacacacacaaatactacacatgaacacatacacatgcgcacatgcaggcacacaaaaaactggaaacaggaggggaacatgttgagcagagctccagggaaaggggaatgaggatgagaacagattgtaacaggggttgaaaacaattaaaatgtactagatatgtatgaaactgtcaaagagtgaagtaactattttataatttaagaattattacattaaaagcaacaaacagaacaagtctcagagtgtgaataatattcatgtccaatacgggacttccatcaaaaccaagaaactctcaaaattcaataagaaaactaaattttaaaaatcaacaaaatagttatgtacatactctaccaaataatagatatgaataagcacaggaaaaggtggtcaagatcacatgtcattaggaaaacaaggaatcttaagccatcgatccacagccactagcatcagcatgatggaaaatgtgggcgggaaggagaggtcacgaagatgcagaaactgcacacactaatgataggaacgtaatatggtgtgggcccctttgcacattatttgcctttgcattgtgaaagttactcagcgtgtctctgggcaccacatttagataaaagcaataagtccgagtgacctgttgcacagtaggctgatgttagagggaagcccgaaattataaaatttataatttttattcatatacatttgaggaatacagggctcaaaacacatagagagaatttagtgatcaggtaacgctaatccacaggtatcactttagtccacttctttgtgctagcatcattcaaaatctctttaccagcaactttgaaatattcagttaattatcggcaagcatcactagtatactgtgctacagaatactagaagctattctaccatctagctgcagccttgaatttactgaccatcttcacagaagattccgatgttcttaccaccaaaacccagcaaaacaaaactatatgaagcatactgaatttggtcactacacaatatacatgtgctaaaacatcacacagtagcatacaattcgtatatatcaactttaaaagttaaacataaacaagtggcatatgaactggcgacttcagacttcggtatctgtcctactgtgagaggaagaactacagagaagcagccagaggcatgagtgtttggaaagggaaacacagatgagcagaatgtgggacgcccccaccggatgtgacactattccacaaccaagaagaacaaagcattgatatgtgctgcattgcaacaaatgaccaaacacacaggagggaaactggacaccgtaagttattttgtgtagaaggctcagaaagaagtcaaacttataaatcaagaaaggggacgagtggtgactgggtgggcatagggacatagatttcctcataacaagtcagggatcactcaggtggcagatagtgagagggaatcaaaaactagctggtggtaagggttacgtcactcttaactaaaatgtattgagctatacactttaaattattccaatgtacatctgttttaaaaaataaaataaaaacaacaacagtgaatcaactcatatttatttacctaagactcagcacaaactgttaactagcccaacagtaaactttaaggtcatcagttaagcatccaggtgacagccatacttgaaaggtttgtgtaaagagagctctgtatgtctgaccatctgcggccaattaaactcattcccaatcaggatttgtttatacacgttttggaatccattttctccaaaaggccataccaattgaaaatttttgttttgtgtctctgctaccacaaatgtcaggaaaacttgggaaaaaaaagcagaaaagatgaaaagtgaggtacacttgtacccaaagaacttctgcgagaatgttccagaggtggaagaacaccagggcataaatcatgcttatactggagtcagttcttgctcaattattgaaccatttgctttttaaaaactccgttaaaaaaacaaaacgatggtgttgctataaacagtattttaatttattctagaacagcagagttggaaaagaaggcctttcagctggctaaggcggtagaaatggcctgtgtgtgctggccaggccaggcaaacaagcagctgtgggctgatgggtgcacaggtctcctaagcaaagaactcgagagggattctgcctgcggatgaatgattgctgacaaatgctgagaattgtctttttactgaaaggcagagttcacaagccgagagagaagccaaagacttggcattaccaggccacagaacagaaagcacctttgagaaacaaacgccagattcccaccacctggaagaaggcagcagagatgaggaaagtccaaggttagaccaacaatcagtttaaggtaagtaacattttcagtaagacccatgctcccagtgggggatgaatcccggagttcattgcttagcactggtctcacactggcttggaggaggcacagaagaacactgatgctctactggtttctgtcctgagcctgcagcaaatccatattgggctaatgcatcaatacatttaaaattcaacagaagaaggtaaattaaaatatttatccagtctctggaagctaaaggaatccataatctcaagagcaatagacaaaaatcacaaagaaaatattcccgtggtacagtaaataaaaatgagaatattgcttagctgggatatagttcagttggtagagttgcctagcatgaataaaatcctgggttcaatcccaagtgctacatatctcagtaatctcagtactttggagatggcaacaggaacatcaggagttcaaggacatccttagctacacagtgagctcaaggctagcctgggctatatgagaccatgtctccaaaaactctaaatattaacagaaattaagcgtcaaaaaaaccatagaataaatattttaaaaactaattctctgaagacccactctcgatcaataggttgaacaaaagctttagacctactgtctattgataggatgaaaaaggctttaatttttttactatttagaatgatcacatgctggccagaatgaggcaaaaccagaacccagacattaagacacatgcaaccatatgtagcagaagatggcctagtcggccatcattgggaagagaggccccttggtcttgcaaactttacatgtcccagtacaggggaacaccagggccaaggagtaggagtgggtgggtaggggagcaggatagggggagggtataggggacttttgggatagcatttgaaatgtaaatgaaaaaaatacctaattaaaaaattggaaaagggaaaaaaagacacacacaaccacacagacaatgcacgctaagtgcttcagacattcacacacatgtgatcacattggccatgtatgctaagtgctttaaggtgcctaaactgggtgtcaagaaggttatgtcaagtacagagaaatctctgcacacacacacacacacacacacacacacacacacacacacacacaaaccaaaaacgttactcctctggatatggtcctgtctaaaggaaatatagggtcaaagagtggagcagagactgaaggaaaggccatccagagactgccccacctggggatccatcccacatgcagacaccaaacccaggcactattgcagatgccaagaagtgcttgttgacaggagcatgatacaactgtctcctgagaggctctgccagatcctgaccaatacagatgcagaggctcgtagccaaccatcagactgagcacagggaccccaatggaggagttaggggaaggactgaaggagttaaaggggtcttatctggcattgatgggatgggaggcccttggtcctatgaaatcttgatgctcagtgtagaggaatgctagggtggtgaggtgggagtaggtaggtggtggggcggggagcacccttatagaagcagggtaagaggggttagagcagggggtttgcagaggggaaaccgggaaaggggataacatttgaaatgtaaataaataaaagaaaagaagaaaaaagaaaaaaaaagttactcatggtgacatagcagaaaaagaagtacaagggtagagtcccaaagcttaacaaaacacaaacatggggtcacgtactgcttctcaaaggggtacctcaggataagcatggaatacagactgcactctgtgctgattgggaaaagaaattactaggtaaagaatagaaacagacccaaggaaacactggctgcaattgcattagcatgatgggcactacacgaggttcagcaaatgtgaaatcatagttctgaggaaaatcatctatctttgcatcataatttgtagctctcagttacagtttgtggtctagcaaggaaacagtgggctcttgtcactctctcaatgtctacttcttttaggaagatgtttgacagacagctaagggaactctcacaacaaggcttggacttctcaacaatcctgatgtctcagcatagcttctctcagcaagtggctgagacagcgctagaatatggaagacagcaactgccattcctttactgctgcgaccagatggaactccagagtgaaggcagcctaagcatgggctatcacaagcccatgtgtaaggtctcatgagcctcagtccagatgcaaagaccaagtcactctgtgtgccacatggaccacagagctaggctgttctcaggccatgacactggcctgctcacactacttattaattcagcacagattgctttgatcacagtcccttgctacaagcagaggcacaagctaacaaacaaacaaataacaagagtccatgttgcacaaactagaggaggtgagtctgtagagtggagtaccagggaggtatccataacggcttgggagtattgaaatcatctcatacaggactactagcgatcactttcttgtctaatggatcagtgaaaatatgaaagagtggagcacagcattttgagaagataccgcagactgggctgtggctttggcagtgggagactgagacgaagaaggtttaccagctccagactccaaatggcacagagactcttgtgaaaagcaaactggacttttgcctgaaggcaatgagcagacacatgctttagaaatataattctgcccgtgggatgggcctcaagttgggcgggtcattggctggccagtccctcagcctttgtccctccaaagtggatcctgttcccctagctgagctgccttgtctggcctcagtgggagaggatacacctagtcctgcagtggcttgatgtgccagggtagggtgatacctagggggcctccgccttctcagaggaggaggggacaggagtggggagggctgcaattgcgatgtaaagtaaataattaattaatgataaaaatataattctgatctgtcactcaacaagtacatattaagcacctatttgatgtgaatacctgcatatggacacatcagggccctgagtatttcccactgttcttatcagaacaaaaccagagcaacatgaatgatatgagctataaaacattcagtgaaatgttaataagatgatcgaggacatggaaacgctcaagaacgcagtagttcccgtgggctccactcagaaactcagggagccaccaaggagcaactggtgtcaccaagagcatcatcactttttcacatagtttagaatatcagcttatgtgggaaaaaaaaaactgatgatatcacatataaaggtattatcacatataaaggtattaatagaaaaaactttaaaaatatcagagcttttgttagatcaacacagtagtatccacttactagtagatacccctagagcctaaatataaaggtaggttccactagggaacactcccaggtgtctggcatgaggcacatggaagctccagtgaatgacatgacagtcatgctgtgttctcagggacaccacagccagaggtaagaaactggggggcgggggaggggcgcaactggaagggactgtgggaaagggatcgaggaaaacaaagcaggtgtgagggccccaccatgaaacccatccccctctgtgtatcaatctaagaagcaaactaacaaaaagactccaagctcaaagaggcagtttgctaataagggtgtggcagctttgaacttggttattaaggcctggggaaaggactccgtgagtgaagtgcgtgctatgcaatcataaggaccaagcttaagtcataaaagctgggagcacctaagagcatctgtaaaccaagggctggggggagcggcagggataggtggacctccgaggctgggtggccacgtagtagaacaaatctagaaagggcagggttcagtcagagacctcccgtcttgaaaacataggaaagaacacaatgaagaaagacacacatcatcaacctctggcctttgtgtgctagtgcgcaaatacacacacacacacacacacacacacacacgcacccacaagcacaagctcacatcagtctccatactacaaataatgatggagcaagaaactggaagtcacactcccttgagcctcactgaaggcatccaggtctgaggagacaactagaaagtcagaaaagagaaaagtaagatgaccaaacacactgggcagctttgtggtatttgtctgcaatataaagaaattacaatcctttcaatttactcaaaaactacagaacccccctgtatcacgggtgattttacttcctcaaggcattatttgctggacctcccatctccatcacagtgaagcacacgaaattcccctgataagattaggtcactcttcaaagtcttagacttttaacaatatttatttagtgtcttttacattacgagagttttgccagcatgtatgtatgtgcaccgtgttcatgcagtgctctcggaggccagaatcaacacttgatggagacagaggggacaagagcagggagagatggtaaagggaaggcaaagaggccaacatgaacttctagcttaaactgactccatccattcactctttcactcaacaaagtttaccctgagctgcttcacctgatactattatagtagttgtggctacatcgaagaacaggagtgtgggcacagtgaggaaagtgcctgacctcatgatgtcccaaggcctagcactaacaggaccccatcgtgcaagctgcagagtatggaataggtcaatgagaactgccagaagagagggcaaagaaggggtcatggaggaatagctgctacccccaccccccaaaaagttggttccagttggctgtctcaagctggttttgtatccccatcacagaaggaagtcacccttttcttctttagctgcccaatggcagaacttccagaagtcagagtcatcaaagcagtttaaacctcagccttttttcctgatgcccaacatcaattgggccataaatctgtcatatactcccgctagtttagatccctccaagttataacccatgcagtctggccaagacacggagactcccagagagctttcatcacagcccagctggaacctcttaattcattattttcagtcccagccagtacctcctatgagtactccaagttcaggaataactaggtcacaatcatgttctcaagatcccgaatccctaattgcaattcccccatgataaaagaatctgcgtccgaattcatgtgaaccaagttccttccgttctcaagccaaataatattttctcttgtgtaacttgagtctgaaacttggttctcaaaacaaaaaggcatttttaagtttgcgaaccactgattaactccgagggggtggatgttcaaacagctcccaacatgttttgctgacccactccgtttatcatctcctttcagccttctctgttgtcacatacggtggcatttgcaccgtaagaaatcaagaaacttgcaaactggcctcttaaaccaacaaagcttgtgctttctcggagttaagtggccctgcaaattctcattacccctctggtcaacagtgccatttctaatttcgtgtttcatgtgttggtaagtgtccataactcatgagctggtgtgggcacagaggtaagctgactagagaagaggaaaggtcctgcttggccccttcccatgggaaacacactgttaacattagcacacttaacacatcccctattgtaaaagcgaccttcagctggcacggactgacttgtgcagcttaacaattcaagaggaaattcggctgttgctgtgtacttgttaccaggtaatacctcttcccaccaacacacaatgttggggagggttgtcaacaagaacttaaagactggagtccaggaagtgaggctaagcaatcatgagaggggctgttatttccaatattttagaagaagaaaagactttaaaagtctagccttggggttggcaagtctttcaaattcatttttaagtttttcattaaagcagagaagtagaaaggagaagggcatctccctggtaaaagtcacaagctatgctacatccatgtgtccgtgcagaaaggaaaacggctgagcagttagggcaggacctttgccagtgatgttactggggagctttgagacaggactgtgaactgggctataggagcctgggccctgacattgttccactcatggatgtgcacactttcaagtgtgttctctgacttctttcaaagttaaagatgtgatctctgaagctgcatctccagtgtggtaaaacccttttaaggtattttcaaggactgggtatcagtaggggctatgactttgaagggaaggcaggtagggaaagtctagtgagaaaaccaagaccatcaggagaaagagaagggttccctgtcatgattatggtatgaatgcagtaatcgtagagaagagacaatgctttacatgctcacaagttcacatgcttgtgaggtaagtggaccatgccaccagacggatgaactggtaaggttgagtgagcccaaaccccataagactcataactaagtatggtaggaatgaggccactccctgccaaactctacctgaaactggtaaccatgacaccccactgagaggactgcagcatcagttagatagcacaaaagcctgatgttctccatgttaatgaggtatctagacagaccctgagtgttcagccaaagagtttcccttcccagacatttcttcccacaaagttattcaatccctggttcacctgagtaaggtgtatgcattcacattcgccatcaaataaagcagactggacaagcaaagactgtctcttcatcaaggatcaccataggaggaagccttaatcataaagagcagagtccaaatctcccagagaaggccttctctatcccagcctcctgaactctcggcactcactcggaatcaagttgggttccacctcagtcccagactttgccttccccttcctgcctagcatgtggacatcccaaggggaggcatggattggggggcctcattcccaactcccagcagtataccggcagtgcctgggtacacaggagactggcaacctcagcaatggccccagactccactgttttccaccaagaaaacacagactgaggacccccactacagactgcagtctgccacccctgagtggggcaggccagcactccagcccaacgaatgcagagacaagtgaacataggagttgccctatcaagttagagagctatatgattcctgttaggctgctgcttggtttttaataaggactatatgtatttacaaagaacacctatttacagataagtaagcaagaaagttggcatgctcaatttccatagtccacgaagactcaagtcccccaaagccagccttctggagtccaaagccatctgcaacccaccgggatgctgaacaacaatggtgggaattcttctaagaagcttttgcttcagtctggagttctttcattggtccatacgtctcacctcaacctacactgatctgagaaagaagcaagagtactcctcagcccttcacagtctcccagggggaaaagcaaattcaagcttgagctccctcaggctccttggcctgagtcaagcttcagcggggacttcttaaatgttagttactaagcccatccttcaattattctcagtctgttagggaagataagttttctgtaaccgtctgatctaatagagtaatcattgatattaattttatgaaattaaaaaggagcgttttaaaaataacttctaaaactagaatgctctgtataaagtcaactattatcctaaaaggagtgaatttttgaaagataacagaggaaaagaatccagacaaccatttaaaggataaaatagtgatagagaaagaaacagtgtctccattgttcccgggcagctgtggacctgcctttgcaacgcttcgggtgagaattcttgctgtaagctagaattccatactaaccacttatgttgccttaaaaagcttcctgtaatgcattcaatacttcacttttacagcataaagacaaaaccagagtgtgggtcactctatggagaatgtcaaagtttgatccattcttctttttcggcagttactgaggcaacaacagcatttccatacacgtctttttatttctcatcaaacatcttagttttctttcctttttctttttactccaattttccagttgttcctcaggtaccttcctacactgtgacactatcaaaggccatacagcctatgtatacatcacagcaaagagaacatatggagtctttaggtttctgacaatctgacagttgcaacatttgcatttcatgggatgactgagggaatctgacaaatgtttgccacttctagtctcagaaacagaacacaattgctaactgttggccttcagtcaaacaccccagtttccactgacctaggaaacttgctgtatgtaatcctgcatccagtttcaaagtgtttctgtccagtctctacactgccctgtgtcttctgtatgctgcttcctctgtgtgactttgcaaaccaagactcaggctatggatgtagataaccccacaggcaggaagtgtgtcttggtggacaccccaaataaagcatgggaaaaaagaaaccagatatacattaggccattccagtgagtcaagactgtgccaaaagccacacacccgaatttgagtttcttcttaaagccagatcttcttgtgaccaaatatttctcaggggaagaacactggcagcatattaatccatgtcactttaggctacccaaaggaacacactgaatgcctgtcattcttaacccccctctttgcagccacagattagctacactgactattctgttatatggaattaaactaaggcaacgtcataatcatgcacagtgactggaaagttatgctccgtacggcaggccaaacgcttgctgtgattttgtgctgttaccttggtaactgaggaagctaatcactgaacatctccacagccatgtggccactcacgttctccactttgagccacaggtggggacaggacagatgagtgctttcagcactcattgaatgtcttttagattaaaggcattctctagttctgtgacatggcagtcccaaagcttgttcccacagagactttctacttcaaattcccagttgtttgcatgataaagagaactccatgcctcctgagaaacaagccagactgatcccaagagacaactgattctcaacctttccctggctcctagcttccatgaccgaccctcaaaagaggccagagaaaaggctcggcggtggaagcattagctgtcatgcctgatgacctgacatccgagaacccacatagtgaaggagagacccagctcctgaaaacacacacacacaaagagagagagagagatttcaagctccttcgggacctcttctcttcctatttaagccaaagctcaatttccatgaggcctcaaacccctcatatttcaataaaaattttattcatcacagcctcagccaaagactgccaatcatacaatagcgttttataattaaagacaatctctcccaataaactcaatccaaaagattttcttggtcatataaaattgagatcttaaaaagactgatcaaaagactaagggacacaggacagaaattacaaaatgtcaatccaaaattaaagaggtgtatggaccgagaggaagaaataaagacgcttaatatcagagggtccattaaaaatagccaatgagccgggcagtggtggcgcaagcctttaatcccagcacttgggaggcagagacaggcagagttctgagttcggggccagcctggtctacagagtgagttccaggacagccagggctccacagagaaaccctgtctcaaaaacaaaacaacaacaacaacaacaacaaaacaaaaaaccaaaaaacataaacaaaaatagccaatgattgagagtggcagccatgggtgccacaggttgggggcacatccacatgacacctgagctgttgtggaagccatggacctcatttttaggcccccactttggtgttggctactagggttccctccagccccagttttcctggctataaaataatcctgcctcccaaggcggagtgagctagggatgtctatgtgtatcctacaggtctaggcttcatggcataggagagagcacttttcacagaattcactggttgcgtttgacactgttcatagttttaaaagttagaggattttcaacatatatatggaagtgccattgttttgtatactaacctaaaacccaaagcaaccctgcctacaggggtcagggggtagatcaatcatttcttaagtgactcaaaagaattgtgataaatgcttactgagttactgaatgctagacattggttataaggtggtgaacaagatgagtgaccacctgcccccccccccatggaatagaaccatgctaacaaaccagcaaacccctacttgattctttttttttttttttttttttttggttgtttcgagacagggtttctctgtggagctttggctgccctggaactcactctgtagaccaggctggccttgaactaagaaatctgcctgcctctgcctcccaagtgctgggattaaaggtgtgcaccaccacggcccggcccctacttcattcttatataaactgctccatgcagcctactcttgtacacagtgatgtcactatctactgtttcgttttcaatatcttttagacccagtaagaacttacccttctgaagcccacaaaaccatacgtggcattctaaaacaggacatgaccaaacagtatgttgctaggtggctgttgttatttctgacagaaactattacaaatgtatctagtgactgaggaggtggccatgacttgtccaaatagcgactgatttatggagggcagaactgcaattaggacatccaaaggcgttcccaggggataagtctgcagacatccactcaaaagcatgcattgtctcataatgcgtagtgtttcaacaattcacgttcatggtgtccttgtttctaggtcacccagattccaactcaatgatgattccagggaaaaactaggggctcagagctgcatgagcacaggaattagagaaagaaagcaatgtacatgataaaattatcaagatccctctgtcttcaaagaaaaccacaaagaaccctctcatcttaacagagtcagtatttcagggctcattgggggcattttatgtatcaatctgagacttggtctattaatgtaatgaagaaaaatctattatatgaggctcctcagtatgtccagaagaggtgctatgataccagcacagtttaggagctggggcaattgtattacatctgctacttcagacatgcgctctctcaccaatacacagtagtaactttatatctcctctccacttatagcaatttcctttcaggttaggatgcctaaaatgatctatttatatttgtaattgtatgaaaatgtgtaggtgtgtgcatgtgagaggtctatgcatgtgagtgcaggtttctcgggaggccaaaggtgctgactcccttggaggctgtgagtcgctgcctgacgtggatgttggtactagaactggggtcttctgaaaagagacgtgtgctctcttaaccactgagtcatctctccagcgctaagatgccttcttgttcaggctgagcttcatagaccttaacactaataaagatgctttgaaagctgtaggtttaaactactccaatattttggttttcaaagcttgcgtcttccagaaccaacatttttattgctttgaaataaaagaagagtggcttgtggtgctacacctggaggccttttttgactccaacctgacgatgctgtctgtagactcaagttatcagagccactgtaaaattaagtatgaattcgggcagctgctcctaccgttctgccagccatcagtatctaacccgtctcactgatttttagaatgccacactactgagggtcacacagctgttgtttgagtgcgaagcttctcctgtaatctccacctgtgtgaacttggtccccagtttttggtgggacgttttaggagggttgtggaacccttaggagtcggagcctctctggaggaagtgagtcacttgtggtgggacttggggggggggggggtagcagtgcttccaggcagctctctgctacatgactgtagataccatgtgactagccacttccgacccctcctgccatgctgtctctgccaggacagactgtatcctttcttaaaccacgagccaacatttgtgtcagatattttataacagccatgagaataataaggaataaaaacacacccctaaagtacctcttttatcttgctgctgggtttttgtgaaggggcaggttcacacttcatttggttgtatgtgtccataaaagtagtaaaaccttccataaactttatctagggtggacagtgagcgcttctcacagcctcgatcggcattatatattatcaaggatgtggccgacctctgcttcctcattattttttgcacgttgccctcctgtggtgtcagtctgtggtacaactgcatgcaatagctgggcgtgtgttaaggaaatgcatatggctgataatatattcgagaggaaagctggttgcatctgaatcgatccgaaaacttctaaatggagagtgggggatgcggggggggggggtgttggtgatcacagtagagcctctaaaggagaggtctgattttattggtatggtaactttcatgacatcatttatgaagaagctacatctggcaaagagtgaggacgccagtcaccagcaatgcatgattgagtcctgggttcagtgcttccactgtaccttctcaacactttcaccaggcacaggccttcatcacatccattgtacagatcagagaagtaaaacgaaagcagttagttgcctacggccccatggccagcaaatggaaggatttctctccagaacctgtgcccttagtatattcccaagaattccgggaatggcaaagcagttaagaaaaatgatatctcctagacaggaatttttttaagtaacattaaaatgatagtcatataatattaaaatgaaataggggctcctttggggtggaagttagtctggaaatgattttcctattaattcctctaattcataaaagataaagaaaaacaacccataagccacaaggagcccacagtgagggacccacgatggggctgtggatgtcttcaaccagctgtcttctatgggttttgtgagaacttgtcccacttggtaagtggaaacatgacaggaagaatgtggttctaaatgaaggctgacaagcgccgagctactccaggttatgagctctaaaaaataatcaagaattttctatgctgtttaaaggctgtcttcctcaaggaagacaggtcaattctactgcatactgtttccagtgccagccccgaatcattaagatgttccgtgtgccttggattttattcttcccatgctagagaaaggtgcaaaatactgtcctcttctcaagtgaagtttataagtcatataaggaaagactggatcgaaactgctgaggggaccttgtgttgctttgctctaaagttcatgagactgatttagagagaccaggatctctgagacagcgcaagcatcccagggtgacttgacggaaagcccagctcctcaaaagcaagcccgagcttataaaaaacactttccctttggataaacatgggcctgacttgcaagccttcacttatagcctggctcagtgtcctgcaacaatgaaggtcaaaggggcctccgtggggacagtagccagggaacagctcaccagaaagaaacagacacagccctattttatgaattgagaccctaaaccagtggttctcaacctccctagtgctgcaaccctttaatatggttcctcatgtcatagtgatccccaactataaaattatccccttgctacttcataactaattttgctactgttatgaattgtaatgtaaatatttgatatgccagatatctgatatgtgaccagcaaagtgtcgcaacccacaggttgagaaatgctgctctagaatattttcattttctaaggaaacaaagatcccaatctattgtcgacttttaaagttctggaacaattcagagccaagggtttgttgatgaggaggcacagtgggaaagctgttgaatgctccattcatgtcctccacagactccatccctccacacaggttggtgataggcatttacagtcatgtccacatgggatacagaacattttcaatcctctcagagaatgagggagtgtctttacaatgatgctcttcatccaaaaccacccaggagtttagctggtcacctcgtcggagtggggatcatgaaagaagcagaacttaatcccaaaacatgaagctattgcatgggcatgtgagcgaccatcatcaatacaatcagcatccagagcttcagggtaaggatgtcaaagacatcaatggggggcggggggaatggaggcttctggaaggatagatgggcagatttgagaatatccagtttttaagttaagccaaaatattttgtttcacacagaactcccaagagttcataagttaatgcccccattacctctccaagaataaggctgtagggctgtagtataggatttccaaaatgatattgaccatggaaactacgcttcatggacccctcttgggactaatgttctacaaaaagtactttggcacatcagatggaccacatagctccagatatctgtccaatatacattaataaaccccaaagattgactccctagggaccatgactaccaggaaacataagcaccacgtatcccctaatgctctcaactgtgcatataaacttggtaagagtctctggacggcagttcatagacagagctgaaacagtttcagaaatagactggcccgctcccaatttatacatgcaaaggagaatttcttgaaaactccactaccctgccttaatacaaaggagaatttctttaaaagcccataccttgccttggacagaagttatacagaagcccggtggaggggggtggacctcagagagccctgaacccagcgctttggaatgaggccagaagacctttaggctccatctgtgctcccataaaagggtgctcccagcagggagtcctcctttttgccccagaacaaactgagtgtctgtatatctgtgcactgtcttcctactgtttacattatttcttgtcacctctgctactttgctgtctcctgcacaaatggctctttgcaatgtgtgtgtgtgtgtgtgtgtgtgtgtgtgtgtgtgtgtgtgtgtgtgtttcaaggctgatgacaagagccatgcgttacttcctgatcctaccacttgtgtaagtcaaggctgggcctttactaaacatttactgtagttgtcacacctgacatgatgcagctagtgtgttcctcgctcatgcttaacaggattccggtaaaaagtcctgataaactaggctgctttgaagccatggtaccctctggatttgtttactttttgagtatccatgctgcccctttttgctttgtgtaaaaatactgctttctgtaaagttggaaaaaaaggcagttggagggagaaaagtccttgcttaaggttggctatccacgctggaagcaaggctctgggctgtattggataacaccacagccatgagccacaagcagctatctgatgctttagactgagatgtggtaaaacatggattttggtgttcaaagacatactaaagaaaaataatggaatacattatattgataacctctaatgctatctaatgaaattagatatatcaggttaaaataaaatgtaactaaaaaatagaatttgccattctcttcccgtggctatgacaaaaattaaaatggtgagctttacacattccaaactaagaagtttcccaaatatcacacatggatgctcatatccagctttgttttctaacgcattcacacgggaccagcaaaatggctctcagtggggaaaggcacttggtgccaaactttattacctgagtttgtcccctgggtcccacatagtgggtggagaaaatagatttccaaaagttgtcctgtgatctccacacacgtgctgtggcatgtgtacagaagcatgtacagacacacagacacaaatacacacacgataaataaacaaaaattccaaattcacaagaactaaaagtaaaaggtaagatttgaaactaattctctgtgatagcaaattttatagtatgcattctagccttggggctggagatacagctcgtgagcgtttcctgtgctcatgtaacggcccgagcttgaaaaccccagaagaaaccaggtactgctgcaggagtttctgtacccatagcaccgtgtagaagatgaagacaagagagttcctgagactgccagctcaggtctgtacagctcctggtcaggtgagaaaccctgtctcaagggagaaaggtgaacagtgacagagcaggacacacggtatacattgctggcctctgcatgtatgtatacctgcacacatatgatcatgttccacatgcttatatcatataagaatatcacattttaaaatattaaatccttacttcactaatgcaaggacaggttaaaacgatcctttcaactgaagcacaaagaccaatacgtgacactgtcaaggtcaagtatgataccatgatgcagaatttgcaaatgtggatatgatagtctcttaaatctgtgtgtatatcgacgtgcccatgggaggcacttacctgacagaactaggtgtcacaagtacttctgagggaactggtgggaatctactttgcaatacaagtcaccagagaggtttcaaaattgtgcccaacaaaggcatgtaccataggtcctgccccctgaaggacacagagcacccaggaatgcccaatgtaggttacatggatgtggggtccaaagatggatttttactgtgccaaagttggtggtttgtggtggcaaaaattaaaaggcacaaatgtttctagccataggctaccaaaagagaaagctggtgtgggtgagctggaatccttcccccaaaggctgcctagacagcaaaggtgatagactctaaaaggagagacctacagatggtgatgttggtggaagccaaagcaggaaggtagggtgctttgtctacattaagaaatctggaaagcaatcataaaatgctctgtgtcaacagaaaacctagcctaaggtgcgcgctcgagagagtataagacagaaatcaggcagtttccaattgcacacaactggttctgtgaggtgcgtgtgccctctgaaccacagctgttcaatcagaaatatgcacatctttgttaataggtgtagtttctggaccacgtctaaaaaaaaaaatcaggtgtattcgatgatgtgccagctgcccagttgtaaaaccaccttagtcatagagtcagccttggagcattctgtgtcttcacattgtccctctctgttagactgaataccaaaggcgaggcgcacagagtacttcagcatatgttagtgatgtgactattgcttgtcacctgtgggaaatcagcagcattccaagttctgacctacgtgcaaaggccccagagggatgagggttggtttgcagcactgactccaagaaccttatccacagcctcttagaatttaaaacaacattgaggcagtgagaggaagcggtccagtgagaaaaggaaggtcctcttcatttccaatcccagacaagtctcggagaggcacaccaaaagaccccgccattcaccagctctctagactccttcattcctgtgtataggctgtgttctactattttttgcattggaatatttggcctttgaattttttgtttttagcttccaagccaagtggcactgtgaaatgtttaactttttgagatgtcttcttctatttaatataatcttctccagcctgtctatttgtgggaaatggtaggtccctatttcaaaagctaccgaggagtctagtacacatgtgtctgccacttcctctcctcattccctcatccatggacatgtggctttttccatatagtataggtttctgtactctataggtttttgttaagtcctcttatcaccaacaggcaaatatatgagaagataaaagaatttgatccgctatggaagccacattactttctctatgcatcccataacactgtgccataagtcccaactatttgccatagaatttatttataacagattttaagccaaatatgatgcactttggggggggggtcggtgctaaggcaggaggattgcaaaataaggataatctggctacacagcacaaaataaaactcaaaaaaaaaaaagaaagaaaaactttgaagacaaaaaggaaacaaaggaagggagggagggagggggggggagggagggagggaggcagtcacgaagagctctaatcagctcctgtgaatcaacaatgcatccgctttctttgatgaagtggtatatccagacaggactacatggttgtcataaatctgtatcaccgagtattagtctttcccactcaccagacactacagtcaatgcccttcttggttcacataatacttactggttgcttaatatgatacagttttaaaaaccacttaatgaaattattttgaatatatctaatgaagacaacttttgtaacgtaagagaagctaagggatggaaacaggaatcctcgcacgtcatccgcacctacaggtacagatgagccacaagcagcctagttgtttattcactgctacagaaaaaaacaaaccctgcccatctgcacgacaggcacagttgcaggaggtgggtcccgtcagtgactggcaccagctttgtgctacctcatgccctctgttggattccaacagtgcttcccctgaacttcactgataaatagctaacaactaaaagcatctctggagtgggtacagagcccaatattgtccttatcctggagacaggaacagggatttatctgaacaaatgcatctggatgtaagaagctaggcacacgctcatagcctatgtagtccttgggagcccattaatatagagagcagccggactagaattgttcttccgaagagtagactggtgcctttaaatcaaaatgagtcagaaaattccaggaccttatgttagattcaaccttcttttggtttttaaaattacttaaaacaaacttggttgaactgtaacatggagaaaaactaccctcctagccttaatttttaataataataataatttgctttttgagactgggtttcaggtatccaggctggtcctgaacttcctgtgaagccaaggttggcacaaatgataagaatgctaatctgtctacatgtagacaacctacactgcctgccttctagaataaatggttcatgtccaacactatgcctctggatctcctgaagaggctagaggaacgcagttcacatccatgggtcaggcactaaggattctgaacccacagctgctcctgagcctgcactccagaggcagaaaaggcaacctgcagtttcattatcatttaatggctgccattatgccattataggagggggggagagagagacagagacggagacagagagagagagacagacacagagacagagagaggaatagagggaacagatggaataatggcttccaaaaagttggtttccaaacaaaaatgcctcatctcaatgaaaatagactaccactaacctaagtagttatccattaacacaattcatcaagagaagctgtcttcccttcaacattgatggtcatgatagattctacacattcatctaccattcatgaaatctcacatatgtaataggtaaaaagatataggaccccattctttaaactttcggaagagaacaaaatggtgaagattcagtagataaaaatgaattctgcaatcaaaatggtacttcctcctcccccgtggtgagaagaaaggctttctggttcccctccctcactgaagggcagctctgtgctcctgggagaacaatggcgggtaacagctagggaaagccgacttcctgtccccagcctccacttctccattatctggaaagctgccacagtcgctactcttctgtggccaagtccttccacatctcagtgaaggctacttaaatacaccctaaacttggagactccacatcgaaactcaccactttgattagtaatttggtaatctcatgcattcaggccatttctccatctttggcaaacatcacatttttgaaatagtaacgggtaaatatcaacagctcgaaatcccttaggtgctccacatcagcacctcccaccatgggaagcaattattctttgcagacaaccttggaccactttgtttgaagaagaatgtttattttattcattgtttctccaaaacaaattaaactcagcaacaatgtctaaagtgttcccttcacatgccaccaagccatacatcaacaattttaatcggtagcatcttcaccgagctaacagtaaggccacagaaggctactatctattacaaattgtccttcattgttagggtgccactggatatgtcttagctccaggtcagtaatatatgtgcacaggttataaagggaaaacacttaaacacagactccaaaagatgtcaatatacagcacaatggcctcactcattacactcagagtgggccaaagaacagaaatactgtgtcgtttatccaacaatcatagcaactgccctagagttgcttatcaaaatgtacctttggtatattagaaaacaactgaatttatgtcaacattgaaaaataaacaacttctcacatactgcagtgctctttgtttcagctccatggtttgagtgacatgtgtcaatcacaatcataattagctttgctttccatcttagaataagatctttatacaatttgggagaagagtgatcattgcaattttgaaaagttctgaggaattttcttttatatatatatgcaagattcctccatatagccctagccgtcctagaacttgttatgtagaccaagctagccatcatctcacagagatcagcctacctctgtctctctgcttcccaagtgctgggattaaaagcatgtgctatatcatccccagctctggagaatttccaatttcagctttatataacacaaaccttttaagcttcactaaataacaaatggtagggctagggagatgcttcagtgggtacgagcacttgctatagaagtcagagtcactgagttcaagtcttcagaagccatataacagattggtgtgatggtggagtggatccccgtgaccccagcatttcgtggaagggacaggtagattctgggaactcactggccagccaggctggccaaaacagaaagctttgtgctcagggagagatcctaacaccaatacgcaaggtggagaaggagaaataggggaaattgtccctttgtatcttggtgcgcagtctgcttatgtgtaaattcataatcctcttctggactctacatgtagaacatgggtgtgcatacatgtgcatatacaatatataacatgcagagaaacagataaattactttaaagaccagttttaaaacaacactaaaataaaaattttaactagaaatgatgagaaaatgactatgaatgtagagacaaaatgataaatgaagctggcatctattaagaacattatgcatccccaaataagtcaatatcgtattagctaggcaaagcaggcaaaatttttcttttaactgataggaacatggagcagtaaatttgaaactgaaaaatccagattcaaatgaaagtttattgatactcatttggccttaaggctattcctggacatctctgagctgtggctttttgtaggcaagggcaagaacagatgtccacacttcctgggctacacactgagtacacagtgctgagcccagctacttagcagacccctgcacttaaccgtggactccgtgtttgtcattccagctgctgccagggtcagtggctcttctagtgtgttttttcatcctacacatttccctttctatgtgtgttcttgtgggaatgcatttctcgaacctacaggatcatgtgaagttcatgatttcacctgtatgggaaattgtcctctttgtatgttggtgcccacccttcttctgtgtaagctaactatgaaacactgcatccactgccaagacctgcgcagcatgcaaacccagagcctgggtatccttggcatcctggagacctcttcagtcacatttcagaagcctggccagccaacttcaggaagtagctgcacacactcgatgacaatataaaccagtaacagattagtcaccagaatgcctttatacaaatcacttagaaaacactttacctctttcacactggggtccagtaaagccgtacgtgcaagcacaccgatttggggccacacacctccctccgttgagacagccactttcacagacagctgcaagataaggagagaaagtctcaggatgctgcacttggacccttccactcagaaagggcagcaaacacaatgggaatgatctcccctcagtgttgctttgggcagacaccccacagttgcagatcaccataggatgctccctgaacagccgactctgtacctgggtcatgcttacggtctcatctcagtgtgtgcagcccctgagaaatgctttcagttctccatctaaggtgcatgtttcaaactcgcctcaccagatacaaacttcatgtgagtgagtggactcttgcttaggactgatgtgtaattttgagagggcgtccctaaggagcagcaatgttcatgctgatagcaccattaactgcaagtgaccaaatgttaagtctgggattctgttgaggttcactgtgtgaagctgggtctctgtccttcctcgcctatctaaggcattctctggttggctttaataaaaatctgatggccaatcggctgggcaggaagtggaagacaggacttcctgggagagaaaggaactctgggaagaagaaaagagaaaggtctttcatcaggagatataagggaagaccagtgtgactcctgacctggaagtctggataaggctagatgatcagattaacttagatgagctagttgagagtctgcccagaaaagacctaagctttgaaatattaaaaggtctctgtgtggttacttggggaattagctggtcaaggaataattgccaccatattaatttccagctgggctgctgtgactctctcctctttccaagttgggctgcccaaaactcaatattcttgtcacatagtagtgtggagataatcactgggcataatataggtgctgatttatttacagtagcattttccatcatatacatacaatggtaaaattcaaaagaacatggacaataacattttattaagtatgcatatgtatagtagaatttaacacaactgtgaaataataattgacaagaaaacacaaataataaaatattaactataaaagctctatcttgggcctagaaagagtattcagattatagaactataggtagttttgttttactaataatgaattttccaagattttctatagtgtgaatagttcatcctacggtaatgaagaagctcataagatgaacagctattctaagcagtgtgcggggaccagcagagtgcagacacaatcaatggtgcttgtgagtgaacaagcaaactagacatccagtcagcatgagtgtagcagagtccgtcatggggagctggagatatgcagacacaattagtcaatacaaggaaaaaatttggaaagagagatgagatttgttttgaaatacttcctgaaaattcaggtagagacagtcagcaaatcaagaggcaaatgtgtggaacttaggctgaaatttctttctgaagggatgaaaatgctctaaaactggtttatggtgatacttgccccatctggtagatgagctaacattatgaagccctacagtgggaaaggatggggtatgtagtttattaattaaataactgtcaaatatttttttaaaagaagtatttcatacctataagtctaaggtgtgaggcaaggcaggtggtaaaggcaaacaaaaagaatgtaaaccaagcaagttactatcaaccccgggatggaagactgccactaaatgttggggtgatctgtccatctgcaagggtcccgagacatctgcgaaaatgtggcgccctgagttatcaaagaaaattcccagcacctgtctcataattccacaggtctgcgtgtgaccagcatctaccacacggtatacttacgctgtccacagtgagtgccgatgtaccctttctggcacagacagtggtcatcgctgcagctgcccccattcatacagcggatgctgcagtgttggactagggataaaaagagaggaaaggcttagtgtggcagtttgtgtgtgcaggtggcaacatttcacctgacatgacttgtggctatttgacaaaaataaaataattcatcgagattcatatatcatgcagatagcagaagggtcctaattatcgaggctcattatgttatgtataaaaccacttacagtgcaatgtgggttttttccttggcacttgctttaatgggactaaatgacttccttaatttagcagaatttatattccagtgtcatctctgtaatttataccaataagaaaggagagtctgagtgatggccccaggacaaggttgaggtagcaatgattcccatgaaaagattcagagttcaaagtatctggccagggaaaaggttggagtaatactttccacccatttttcttccattttgatggcaggctaaaaggacatactagaagcgttacaatagcaacgatgtttgatggacagagagttgaacttagaaagcgctgctcatttaaactgtaacgttaaatgaaagaccatcagtatttcaaatccattctgtgtcacattctcacctagagaagtgtgcatttctaaatcctagactatgggtggataccatcagacctgagacagacagtgatatgctaatgcagtgacacactaaaagtggagtcttagaaatatctggtagaccctcctatgagagatgtccatagtcacagaacatgctctctcctctagcatgtaagctatcttgtgctggtagcattttcaaaaggtccagctgatccctagttgctagaagcagtaactaccctacctagaggagactaaaggcttggctaagggaatcatgagtcctgttgacacttctcaatatgaggccatagttggaagctggagttttggctttttttctggtgtgtcctatgtgtgggagtcaattcccagtggaaatggctcagcagggaacagaggtctgtcccgactatgcagaagcaggagtcaatgggctctgagcactcttaagctgtcttcatggaatgcgcaagccagagtactcttccccttagagtacaagagagtcctccccacagccaacctcatctgtgagaggtcctcgcagcagtgctaagaaatgactacttggctatgtgaggaaaggacatttgtctaaagagctacaaatattcagaggtcaacctagcccgacagccgaaaaatgaaaaattgaactcctattcttactgcagcctctcagacacaaagagttgaaagtgatctgccttttcaagaatcttgctctcttcctggaatgtcataaaaggctccatttctcctgagctagaagatccctgcacctcagcactcaaagcctctccagtagggccctaaacaacccatcagagctcccagaacagtctcctgacctggaaacagatcattcggtcccctgacaaataaatctgaatgcctactatgagtcattaaaaatgcaaggtattctgaggtggtccctttgtggaacccctcctaacctctcctgtttctttgtccctagctctcggggaccaaactaaagctctcatcaaatcccaccagtctccatcagcctttaaatgcctctctgtttctttgctcctctctgacttctgctctgccctccctcccaagccagacgggagatgatgaaaccctgcacatctggtttgatgagcagactggaagagtaacccaggttaagaagctgccccgtgtgtcccaggtgcctatatagctctaagaggataatgattcaaacattttaacctttttccctccatctacaagcgctaatagctccccctgctacagacatcaagcaaaccatgcagacaaacggttactttaggctccattaaagcctctaagccaaatgctttttaactctaaaacaatctacaagtatagaaaggaaaaaatacgcttaaggctttggatactattctaagtgggtcaggaaatggtgtacaattgctttaaaactcagtgctatgcttagttccatgctatcttagaaaaacagcaaggactgggaaagggcaggaaatgacgtcatccttcgagcaaactcagtgcacaaactgatttcaattaaagtggctcatgccaaggcccgatttccattcccacacgagcaacaaagccgcttagctactctgcaatttcaaacaaaaaaaggaaagagtgaccagtggcttgcacagtggcttcccagttacttgttcaaattgaaagtcagggcaaaatctcctttccaggaagaacaactctgtgtacactgaaacgtgacagatcaaaagcctcccttgatacagctttcatttccttaaaccccctctttccagttgaaacttctccaggttaaaaatattctttctcctttataaaaaacaaaaccaccctgtgagacttggaaggccaaaagtcattgtgagcccagtggtcacgctgcccagtgggccttggggttatcagcagaatggaggcctccatcactgctttcatagatgggtcctagagcttaaggaaaaagtgttcctttaaaagtgggagcaagcctggtatgtggtttgtctgtacaaacactcagcactgggtagactgaggctggcgtgtggaagtgttggcatacattcaaggctagcctgggctacagagtaaattcccataatctacagactgagacttcatctcaaaagttattttagaaggtgggtgcaaacctagtatctctgacaaggctttgcctttgccgcctaatctggaaattgtttagagggaccagactatgagttctactcacactcataggatgcagtatccatcaatggatgtgctaaaaaacccatgtcaagacacatgcctaaactcaacccgtattgagattttaccagaaacagaatactaagagagtctaagcagtcattgtgcaagttgaagctgacctgtgcagtcagacccctaatgaaaaagtcccattaaagatggccagagaacctctgatcatttcacaccaggatccacaacctagaagtaacagacacggcccacatttacctgcagccacaaaaggtcccaaataagtattgtattcatttcagaatcggtcccttcaatcactcaacaagcacccactgaaaatcttccattgagaaggtcgcaggaagagctcaaagcctgtctttagaaagtgcggtacaaactcattaaaatgactaactagaaaggaatggcatgcatgcagcacaggaagggaaagatgcagggccaacatttggatctcaacatctcaaccatcaccctctaggcaggctcagcccccagagagagcattaggaaattttcaaataagcaactgaatgtgtgctttaatttcagcactgggaaaagcccaaacagaaaaatgaaataggcagaccaaactctagcctctacacctgagacaacaatccactgaggtggcctgagtcactgcaagacacagacagttttcatttggaccgataattcccttaggtgcataaacatctgtgggtgtctacagactcacacagcttaaaacaaggccagagcacctccaaaacataaaagtcacctgagctgttcagaaaagtttaggtgaagtatcatctgccataagtttccgtaaagtctgtgtagagagaaaactaattcaacaagtgtaaaggatgagtctggacagcctttgggtgctcctccctgtcagtgtaaacactacagatccctaaaatgtgttttctagagccaagcctttcagagaagctatggtacaagtatctcttcctctgcgccctctcacaatcctggcacatggttgtaccacactcttaaccttccttggtcttcctacggtctcagatctatgctggaagtagaagtgtccctagacacaactggaatcgaattaaacagaaaacgacaaagcttgaaaagggcgggttcccgtgagataggagtgctcctccatttgatatgcagatttaatataattcctatcaaaatatgctaaggctgtgaaggaataggtgtggtcagcccgagcttgttatggacaggtgaaggattaccgaaaggattcggaaagaaagaccaaagcaagagtatggatttattttatcacatgtgtgacagtggagaagggacagatcaatggcatagcagagagctcagactcacaaaagcacacccaagagactgttgacaaaccacaaaagtaaatcttgtcagtcagattcctatctctatgtcaaccacttgactaatcgacctgcagagagacaggggtcatgctggctcatacctttggagactccattttacagtttcagccccattgtcttgtgcctacaaggagcacacactggcaggagtgtgtggcagggtaagatgactcacctcggggaaaggccacaaaggacaattccttccaggacatccaacaacctgaggaaccttccctggggaacactcatcgctcccaccatctcctcaacctttatgagacaaaccatggcaaaactaaatgcttaaagacagaattttggtttcttctgaagcaactggacacccataggtaacagctgaccctaaccccaacctcattcttaacacaaaatgtatctccatggaaaccacagatgttgatgtaaaactataaacagttagagacaagttagagaggaatctctgtgatcaaagactatgcaacacattctggggctggatgccagaagcatgaatgagcagaggaagggctgataagctacagtgcactggctttaaaatcctgcttggtggaagagcctactgattcggaaaaagcaaaccatggagaaaggcttgctcggaaatgtctgcagatcacaggtcagacagagctaggataatagggtaagtagctgtccactgcaggtgccaccattcccgtgcttaggattcaggactgaacagagatggagaaagtgaggagtgcaatggcatgcatgcattgcattcatgctttctactcttcactgtacatgggatgtgacttcctgcttcaagatcctgccacgctgacctaccttcagtgatgaactctagcctgagactgtgagcgagataattcctttctctggggtatttttattacagcagtggggaaataactgagacagtcccttccaaggaggaccaggagactgtttactctgctgtcatgtggaaatatacagagagcgacagctatgaatatgtacccttatatgaaaacttccagggccctgattacaactcccagtttctaaaaccataaaataaagttccatgatatttagttatggcagcctgaaacatttttcttttttaagataattttttaaattgtacttatgtgtatgggcatgggtgcctaaggagcccagaaggtttcaaattacctggagctggacttactgacagctgtgaggcacctggcaagagcatcagggaaaagaacctgggtcctgctgcggagcagccagagtcccaaccactaagccagccctctaaatcacctttctttcttccttccttccctttcttcctctctctgtccctccctccctccctctcttccctcctccctcccttcctcccttccttccttcctttttaaaaaattttatgagtattatgcctgtatcacagaagccaaaagatggtgccagagcccatggatcaagaattacaggtggttgtgagttactgttatagatgctgaaaactgaacttgggtcctctgcaagaagaacaaatgttcttaactgctataccatctctccagccccctgaaacagttctttatcctagtattgcaagctaatatgaatttgcaaatgtatgtgtacatacatatttaaggagggttgtaaactcatttaataaacatggtaggactttataagaagtaggattgctcaggatccaaccctggactcagaaacttaaatagggtcctaaccagaactggaattaaaatccagaaggaaaacaaacaaagaaaaaccccagctctcgttttgtctaatatttcttcaacttgtgagcctaagtggccagtggccagagtcctgctaggtctaagggaagctgaatccttctggtcccatgagaatcgccggctggggattaaaacttgtggagagatgtcttcccgtttaggattcatgggccattcaagtcaaacaccacctgcaagaacagcttccttccagcctttcctccatcagaccagaacaataagaggtcagagatccacaacccttcatcccccatcacataataattagagtttctttttccataggacggagtagtaaaaatgatggaaatcagacctgcccaacctgaagcctgcaggctgcaagtgccccagggttgctgtagatgacagtgttctgtcacaagaccaaaaggttagataccctgggaactgggcccttttagaagaacaggtatttgaatgacaatatctcattgatggatgttatcccattagcattagcaggagagttatcaaatgatccatatgcacagacaacttttacaggatgaccacgcctctctaacacaacacaactaatccataaacatcatttccaaaaaccagaaagggattttggctatcttcagctacacttaatttttttaaatattgccaactttaattttttttcatgctcttaagacaatgttaattctaagagagttcaagccaataatttttaagactccatatacctcaaagatcttgaggaagtagtagtctttctacacactattctgatctacacttggctctggggctttgcccaaagtccaggcacccagacagatccaaactttctaggaagcaccacccataacacccagactcaaatctctagcttacatctggcctagggccttactgatatacttcttccaacctcatgactagcttgaagcataccaggaccatctctagccttgttaaaatcctgtccacatcccatggtttttcctcacagacatcttcagcactcacattgtcactggattaactttctatctggacactcagctgtgactttcttcccttaaggtgaccattagataagagaggccagtctaagaggatggttttatccccgttttgataactttgctctttcccatactgaggctgtctctcctcagtggcagtctggggtctttggggtacacatagagatgccctgcatgttcctgaaatggccagttgacttggttgtctctttctgttcctccagtttgggtgcctttgatgggtagagtcagctcacgcacacacacacacacacacacacacacacacacacacacgtaaaaccaggctaaaatcaagtacgagtatgccatgctcagtgtgtggagttaagattcctaggtcacgggggaatttttatcctgatctacaaccagctttatttagtattaggccagctctacttgggttccacagaagcagactctgagacaatttcagcaaaggtagtttgcttgggagtgattccaggaagcgaactatgggctgaggctgggttctggtcaggaattttaggaagtagtgcagaacaaatctcagagctatccaaactctagcccagaagccccagagctgctccatctgtcaccaatggaaagttgcttctgtgtccactgagctggccacacccctcacttcctctactctggatcatccctggacagaaaaatgttgaccaagctttcaagccgacttcatgtgctcccctatgaacgccaagggacatgagtggacactaagaagatctgctgtaccagacaattcactggagccagccactgggctcataacagccacaactcaatgtgaggcctctcagcagacagggaatcttgacacactgcagtctctcctggcaccagacaaaaaaagaacacacttgcaccacaccagtgactctgaaaatcccatccaacatagaatagcagtaagggtgtgcactttctcctccagaaactagaagggaaataggaatacacatttgttttgccttggcaacagttgaaattttgaggactgtttatacacacatgaactttaactttttaaacaactaagaaaggactagcctcccggtccccacatgtcccccttttcaatactttggataccacacttaaagataaaagaaacagtaaaaccagaagggtggctctctagcatgaactgtggatgtttgtgtggccagacagaataaacagcatgcttatatcatgtctgtatgtctgtatgtccatatgtcactgagtctcgtggtttccttgtagaaaggcaaatgtcttgagtttcaaataagtttgtcattgaatcagttttatttttcggtagcacaaaaaaagggggggattcattttctggaaccaaaaaaccgttcattctatgaccatttctgtgaacacttttctccagtgcttctattaaagatacagagatgaacgggggctgtgtgacattgaaggtgataatctttatgctcttcctagtaactataccccataggcaattttcatataaagagtaaagaagtgggaggctagatccaggaatgcctgtccaagaattccaggcaaagtgaaaaaggcagatgttctagtcagagggaaatgtattgcaggcaaagaaaaaaacctaacagcaaatttaggggaaaatagggcataaccacataaaataatattgtctataatgacatgttagactcactggatctggagccacaggaaggagatatctgaccagacgggcaagtgcacatatttggcctcgagcagaatccatccccacaggaatgccggcaaatggctgcaaatcaaatcagaagtctgtcagcatagagttcctcagcacacaactaggcatagggtccaaggctcagatgagggcccagggcccactgcccctcctgtattcatgtacaaagcaagtctaccagagtaaagaaactagtttgaaatcagtaactcccttattgatattggtatttctttccctttctcttattcaacagaacccattcgctcagtgtccctggacaggctatgaagagaaaaccaaataaataaaaatctcatgagaactctgttcttatattaatttataatttaataatggaaatcttataaccgtattcttggcatatgattttattataaacatttaattgtcggtccgctccaaattatactggcagcctgaggggagaatccggaatccaccactgtgaattgattctacaagtcaaggagacactcacactaccagtgtcacccagagccaagtgttctgctagtgtcctctagagcaaattaaatggcagacaagctgtagttctcagcaaactaagactcgctcactacttgttagactctgtggtcctttacccaaactccttgagagcctgtaagaggcaaacatgatgaaaagggctaaaataataaacagggtaaatacacaactgaaacatggtaaatggtttcatagatatgacaaactgttcccagatgagagatcatagaatcacagcaacatttattttgatgcctagtgaaaattttccagagaattccaaagaactaggaggaaaggactctactgccaagctcctttacaaaaccctgaatcccaccatccctaccccactagtaaatttttttctttattcttggtgtgtggacatgcatgtgattaaacaagatctctctgtatagtcctggctggcatggacagacgaggctatcctcaaactcacagagatccaaccttctctgcctcccaagtgctaggattaaagtgcataacaccttgcctgggtttttatagagacatggtctcactaagtagcccaagctgacctcaagctcttgatcctcctgcctcagctcctggagttctgagatggtggtgtgtactgacatagccagtcgtgactttgaccattaaaataagtcactgcctttgctctttgtccaagagttagacctgccctttccctcaagtttaatgtaggtggtttgaggaggcccaggcacattacagccaaacagggagaaattaaaacgaggaagtgagcaatgagaagcccttgttcaaaatcccattagcatgattacagtcgtctatgcagccaggagcagcacgtgcaaacagcacacaactgtaatcaaagagtccccatggctccattctgtagatttagaaatgttctaaaggaaatccctgattaaagaagggcagtgctttggaaagttattgtgttccccaaatgggattcagaaaaaataggaaactcttatctccagaaggctgagctgtaaacacattcatagtattcagtagcaagtatgcaacgaaagccacgatagcatttgagtgagtgacaggttatccatttacttacgaacaatacactgatttccaccaggtaaggttttccatccaggacaacagtatgcattataacgtgatccacagacattgggtctgaaacaaaacacagaattccatactttgaaaaataagaaataagcaaatatgagagagagagagagagagagagagagagagagagagagagagagagagagaaccctctaagtgatcaagcaaaccccagcagacagagaacactaaaatatagaagcctgatcaagttgggtagtttaggacatttggaacattgaacatattggcatggtaggaaccccttaacaccaacatgtacacagtacaccaggaaatgaaaactgggagatgccaaaaagatacctgccatttcaaatgctcgggtgccaaaatccatggagcgatgtgtacaggtctaaattaagccaacttcttaccaacccagatcagaaaggtcacattgaaatctgttacaaagttttcaatgtctactctcagaaatgacgttttccccctctctggcccagatcacctcccaactattaccacattcttccttcacaaaaattacaggaattcaaactctaccatcagtctgaaaaaaaataagggccaaacatgtaaatatttctttagcaaaagcttggaaacagtcaataccagaaatccctagaaaaataaaagcagtgtcactttggcgttactgtttacagacaacttgtcacatgtcttggggtaaagactccgttcagaatccagaaagtgggtctttaagagttcctggggagagctgggtgaaggtgtggctatacctgtatctgaaaggcaaggcggaacaccaacagaaaagcactcagctcttcagcgtgcgtgtcctgaagcctaaacattgatgctagttgccaacaagagctaatcagaaggtttgtgttctgagtgctcacatctaaactcctgacccgaggctcagagaacatcacgagagaggggggtggaaagaatgtgagagccagaaaatggggagcagagctgtgaactgctgtcttctggacatagcatggctgttacactcatgagcacactgcagctatggttacccacacaagatcaagccagccaaaattccagaatggatgggggagggatggtgagactatccatccctagctccggaactttgggcagttgatgactgaggaggaggaagtcccagcccctcacccatgcccacatgggcagcagtaattggactcagtaagttattagctaaaaaggaagaaaaggcaactaatgaagtcggggcagagacattttgggggaagtttgggaggagctggagggaagtagcagtgggcataatatgaaagtctcaaagattaaaaagtattattttttaaaaggtcacatgttttacagtcaatttttataaaacagaagacattccaaagctttctagtataaataccacagtccctcaagaataaatcaactgcacagctaacatgtatttctgagctggatacatcctacgtctacatgcaaaggccgcctgcttgtacgctgtccctctctcttctccctcttgcaggcagggactcaggtaaaatctgttcctgtccttcaccttgcttatagttccagaagttctggaacaatctacagcgtacaatgcaccctcaatgttagggtcaggggagagaattgggctggcagcagccttgaacttcatactcagcagcaggaaaactgagggtctagagccaggtttcctcggcctctttggacttcattgatttcagcttgcattgtgataatacgatgtttgccttctctacagtcggtgagagagaatgtggccatgcaagcatgtgtgcttgtgtgtgtgtctgtgcgtgtgtgtgtgtgtgtgtgtgtgtgtgtgtgtgtgtgcattcatatccatacaataatggacattcatgctttgcttgtaagaaggagaacgggagaaccaaagagcagcagcatccagatggagtcatctcacctactcattttctgcaggaagagacaaaagtgtactaaaaatatatctgagacgtggctcagcaattgagcactttctgctcttccagaggacttgggctccgttcccatcaccaacctgactcacaaccatctgtagttccaatcctgggatggaggagactgtcacataccctcctctggcttccacgagaatcagccaacccactcatacaattaaagcttggggggggggaataatttaactgcacagatcttgtcattttatccctcatgtgacaaagtctcatccaaaacttcagaatgcagaacatcctgggcaagcaaaagcttggacacagatgtatagaaaaatagaatataggggtatagggaggagggtgctcaaacctaaagtctatcggttttcaataacaagccagccaaagtcaatagctccaatccttccccaccaatggcccattacaacagctccactggatccagcccagcccccacaccaaatcctaggaatgcctcacaaggcccctgagcctttgcagggtgcccagtaaaagccagaactctgtgacataaatgaatgcacgtatggagtggcattgcatataacaaggtgaaacggcctatggaaaaagtccagagtccgttgtttctatcctccaaagcaagatacgcaaaaggttcttcccaaggtattgaaaagttataatactatgaacattattgtttttctatttatagaatcattccattaccaaaagcatagaaggctgaagaatttatcacagttacaaaacaggaagttagtgttctaagtgtctgcagtgtaaaagtcacagcacagagctggggagaggctgagagggtaagagagctttcgatgcccatggatgaagagcgcaaatttacataaaaaatggatataaccgcacgtgccccatgactccagcactgtggcacacacagacaggagatctagagggcttgccagtcaccaacatagttctccattcagtgagagatcctgtctcaaaagatcaacagtgaatgtgacacttgatgtacccctctggccatcacacacaggctcacagataaatacaccacagacaagttagtgtaataaataatcagataataatggcacagtcagcatgaatttagaaacaagttggaaaaaagggggttggaaatcaataagacaactgattcaagaactacgggtgctaagaatattacatagaatttcaaaacaaccgacaaataaaagttatgctcttgggggctagcctggtttaatattaagttccagatcagccagggctacacagtgagaccccgccctccaccaaataaaaaccaaaccaccccactaaagaaatgaagcagaaggagacaaggtattcatctctcaatgggctaaacacatatttcctaggaaacagacggctattgagtggggacatagtggcatgggtgtagcagatgccactacagacacaagcatgcgaactgaaaacagactgtgcgtcaggccagcagtggggagatggtttgcttcgccgccactttctgcccttacaaccctgctcatactttcacaggtaaacacttggctcataacctggtcctcacctttaacccaaggcatcagtattaaagtgtgaatgctttcacctagcaacagaatgctctgcttgaatagaaggaaacagacaaccctgttcctttctccacactccccggagcaccgagcaccgcaccactttaccatgcctcctttaagatctgcagaatggagtgtgattggcttaattcacatttttgacttttattttacacttttatcttttgcggggaggggggggtgtttgagatagtctttctttgtgtagccctggccatcctgtagactattgtagactaggatggccttaaactcagagatccacctgcctctgactcctaactgctgtatttgaaggtatgcaccaccaccgcccagccattaattttatcttttataataaataacatactttgaaattttcagttgtttcaacccacaccatccgatggtagttctgactctcctttgtatagctccacagaaagtggtagagatttacaatgtctttcctgagattccaatcttgagaattgtgagctaatagaaatttcttaaacaagctgagcagaatttgttctacttgcacacacacacaccccaaaaaaggctctaatctaggaacaaatgaatgtcttgttttagttggaaggcagtaaggcgtgagagagtctaaggagacacatggggctgttttcattatagaggatattactctaaggtttcagtacaaacagcatttacaaagaagataattctttaattaagttactcctgtgtaaatgagagtatagcacgcacatgactttctctttctttttaatcatcctctctgttgacgcactgctccttaaaggtcatatagctaagtgttctgtggagatagcagcagcccttagcaaattaagacgaattaaaattcagaggaaacagaattttccactaaccgctaggattccattcttatgttttattttcagagcaactcttggaggtgattattgcggtcattatcttttactctgaggatattagggccttaggaaggttaaaccaactaccaaagtcccatagcttagcaatatgtcatggatgaatctgaactcaggaaatctgcatctgagtctatcctctgaaccaataaactttagggcacagaggtattcagaaaggaagatggtatttcactcaatggcacgtgtggtgacatagataatcaaaatcacaacatgtctaccaatagactagaggtaagggataaattatgttttgcctgcattctaacagtccatggaataagaggagaatgtgcatggtctacctccccattgtgatacttttgtttttaatagttaggtgggacttcatctgcaacttctcctaccaaactccatcaccctggggatagtgagccttaacaggcttgctgttggagccagttcagacacagcacttggaggctgtgtgggctaactaaagcctctctcagtagagcaaacagctgggctctaccacatctgaccacatcattgcagaaattggcctctgtgaaagatgtctgcagatgtctacattcctttagccagagcccacttctgcaagcttggcctgtccaacagcaagatagcctttctgctttttctcctaagtgaaaagccttttccaaatagggttggtgttataaaaacaaagtcagagggcttttatttcatataagagtttcccagtctactcagcaattaaatactttaacttaaggtttgggcaaatgaggctgaccttgtgccccaagttacaggctttttttttaacctctaagagagaagttataatggaacccaccaagtataaacactgaaatctgaagaggaaatctgaactgtcatgtaacaaagagtacccaaggattcatgtgacatggctaaggacatatcttaatatcacaccattccagagttagagcctttcctagattgtggaaagtagtagcagtacccaaagtggttctacctatagtcaactacatagcatggttgcatgtgttctttgacaaacttctacttaccaagatgaaaagaaaaagaaaattcaatgcacacttcctggtgaagcacaaaatacatctcagcctgcttctcacatcccaacctttgttattttagcacctttattctgatcccctcagcggaaggcagaggtcgagtcctcagtgatgtgaataccacatgtaagtgttccagcccatctgccagtcacaacaatgtgactaatggaagccgcttccgtgaccgcctcaggcctccgccagacactctggatcagagacggatttctggcttgactgagctgacactacccaggaaatagacgatcctgactctctactttgaaggtacaaaccaaccaacctttctaatttacttcgaggactttttcttgacaaaatcaccaaaaatattattctaagacaacctaaatataatcagaaatcagaaagaatatttcacactctgatttccaaaatctttgttccctacttgctttccctggcaatggtcaactactgatttcagtgtcttctcttcccaaactgtgggctgatacctctttctccttccttctttctctcccttccatctctgcctcttgcctccttctttttgaccccacccatttcttctctccttagtggccattttcaggactttagaagacaatgttttgttagcaccttgaactaacactaactgaatccccaatcacacagctcagcttgtacagccagcaacttcagtaccatatgagcatcagatacgggatcgattagccatcttaccccaaatcacaaagccactcaacaagtagaaccagctcagtgctttcttccaccaaaacccttccaggctaatcttgaccaaaaccatgaaagaattctaattaaggggccatctataaaacacctgatcaacctcggcactacatcaatcattaaagacaagataaagttgaaaatttctccagggcctaaagtgaccacactgactaaatgcaatgtgtaatgtggtaggtgtcctgcaatgggggtaagggcatgaaaggatgattaggcaaaagtcaaggaaaaggattgaaaatggacctaaatacattccagtacatcagtacttgctcactggttgtaatgactgggccatgacaggcaaagaagctattcacagggcacacacccgtgccctcctggctcatacagctctgggaagctgaagacgcagaagtgattcccttaacctggaaggccacttcaaccaacagctagtttcagttcttttagaacctatctcaaatgataggccatccataggtatgtgtatttcttggggaaagaaagaaagaatttaaggctcaaaaaaaaaatccccaaggttcattataacaggaaacgatgctgggctgtgaaaagcagctgtccaggtgtttaagaaccatctctgggcatggcaggtcctgattccttcaaggcactaggcaccttctgattctggttctctggaataaatattcctaagagcatggggagtctgctcagatgcctgggccacctgagcctcccccaaagcctgagcaacagacaattaatttgctatcctatggggtggggactacattcgagtggggattatttatctctgggcgtatcaaaggtgttgacatcaagtacacagacagaggagttttagccccaaaatgggaactagttggcccttgagaggtaaggaaatgttattttaaaaaacagaaacacgggcatgtctcaaagttctatttctcaaatctctgagaagagttgaccagtagcatcatgaaaacataaggagctatgtgacagagtcttgtgacccctgggattcatccaccgagcttgaggttgaccatgacaaactcttttatgtctgctttgatgaacgatgccaaagccacattatacttctccaaaggatagatgaaattgcagaagtgattgaaaacatcagataaagaaagagggttggggagccttgaggggatgggcagtccagggtggcatatggaattctctgttcctacctccttgttatctctcacactagaaccagggggttaaggcaaaccaggactctcacactttgcagaaaatatcaaacttagagttctgcctgggaagacgatacttcctgagtgttcttatcactctgggggagcaaccaatgggaacagcttagaggaagcaggggccagattataggagggcaagctttagctctgaatactggcagctcctgcctgatgaacagatagggctccgaaattttatttctacctattggtatttgaatagcttttccagtgtaattaggtggtggtttggttcctaaactagagaaacagcaggctctcttctactttatccactaaataggctattgtggactgacctgggaacctaaccacagcgtaaaatgtttcatgggaaacaatacatagcagagaatctgaaggaaacttggccatgaaaacccatggggttacaggctgtgaaagagcaggggaaggtctccatgtatgcagccatggggaagcattcatccatgccaggtggtgactttctaatgcagctgctggggggtcacccgtgatatgtaagaaagaccaataaactcactggttccccaaggtgagctgcaatgtaatgggaccttgctttgtccttaaaaacctgaggaggagcagaaggaggaggaaaaggaggagggggaagaagaagaggagatggggacggggctagatctttacctactccccagagaggggattttagcagtgcaatcgtaaacattaagtttcctaaaagccagaggaagttaagtaaaggctgatagtatgagtgttacagctctgaggggaaaggtatcctggcagttgggagccaaggaataccacaaagtcacacaacacaacaaatctcaaacaagagatttattgggaaagacacaagagagcagaggacacatccactcaagagaaaagcagcaaatatctgagcaggaggcaggctttatatagggtttctggagaggggctgtgcagagcttcccactgtggcctgggattggtgggattctgtggcctgaccttgggcttttttctgtaaggcaaagtttggccacctgaatcttaaggagctggaaatggccattaaagccattagagtagtctggggaggggcaagcctgtccatttgcaattcaagaggcttacagttaatgcaattattttattgaaactaacacttgattctgctatggtctaaaacttgacagatttttttttactctcccaattaaaagtaaagttgtaataatttacatatacatgtgaaaaagcaatgaaagtagtgcacattttaagggaattgattaaacatatcacactacaaaataaaaacagtaattagcaaaatttggagaacattataacctacagaaggatttcccccaaaaccctatcaggaaaacacattgctctgctcatttgcagaagattatagaaaaccaaattaagcacataacttttttaaaaaggctactctatggagacctgtctgaagtcatcaaataaagagcaaaggaatctatgaataaaatactcccaggttacagagttctggagcagagcttagaaagatgtttctataatagcccaaagaagatgtgtcctgctttttactaatttgtatagtttggtgccttgcttcttgttgttgttgctgtttgttttctgggtctacaaaataaaaccaccgcttttaagatcgattatacaaagtatattgtgggtgtatgtgaagggaatagagccatgtttctgttataaacacatttcctgtggcatgagtactggggctagctcccatgataaaaatgttagccatttctcaaataagagtttgagggatttgcaagaaatgtctggttgggtaggaaggacaatgatttgaaccctgctctcagctggttccaaaatgcacactggacatccacatgagcactgagtttggcttgtttttagaaaagtagctacaggtgcaccgttcagtgacatggcaactatctacccttgcttaggagacaatgggtcacatgaagttagggtgacccatttcatgagaaatcagagtccctaccccttcccggcatcatagttctcccctaaaatccaacatgaaagctttctctcacccaagtgatacagcatttgcctccacaggagccagggccagggtgtttcctgggagattttctcaaaagatgacagaccttgggccttctggaataatgtccattctcaagactcagcctgacagtgcaccttgcactcgcaccttctcaccaacccctcaccaacactcaaggaagctcctgggtcgctcccactcccatgtcctttcctaagagatgctggctgtttcagtggagttccccatctctgttcaaatcaccagttatactcaggcatgagataaaatgagcagtcccgaggcagaaatgccaaaatgagggtataaacatttccttctggacactgagtggattttaaaaacctcttctttccaactatagtgaaaaagttgccaaagctttgtagtgtccttgcatgaaatccctcctcttaaataataataaactagcgatggtggaacacacctgtaatcccagcagtcaagagacagagacagcagtttgagcacaacctgggctatatggtgcacccagatgactcagatcgcccagaactacatgttaaaatgctttcacaaaattaattaattttaaaagaaaataaaatattgtttccactttgacagccacactagatcaaggaacctagggattccagctatggaatagacccctacagagttatcttctttcatttgcccctcaagtaccaggctcactcattagaaactgcccacaatcgccaacctcatgatagccaatctttgctgttccatgttttgtgatttctttttttctatactccttaaagccatggatcagaaaaagcaaacttggctggctatgaaccttgggtccatattcaaaaccactttccaagctttatagcattaataaacagagagtgtcagagtaagaacattgccattctgtcacccaaataaatcagcagttctaggagatgaccactaacaaccaaagtcacagaaagaaactcttgcattgcaaatgtgcttcctggcaaaagagcacaacacacttatcaagtgtgattgacaaaacaactgcaggattcacagcaaacacaataagcccacaccatagcgggggcccacaaactagattctaccatcctacactcagatggggaacctgggctggaagagagccacctttctaccctgagaaagtcttaccactgagaacacctcagttgcacaagaacataacattctcttggctgggctgaagaatgctctcggtgacatagtgactttacacaggggcatactcttcttttcagatgtccaatgcgaggtctgcaaactggcctatcaacagccctctttcctctataagtgtcacaaggggaaagtgatagtcaatctacattttttaaaaatgtgtaaaggatggatcaaccaattacaaattatggattttatttagaccccaatttcaatgaactataaaataacatttctgacttactaaagaaaatttaagactcaccagatataatatttaaaaactaatgttaaatgtgatgctgctattggatttatgttttttgagggaagttcatcttttacatgttgaaatatttacaaataaaagcatttggtgggcatagagagagtgctatcaataaagcgcttgtcatgggaacgtggggaccttgttgggtcccccaggacctgctttaaaaccgggcacagcagtgtatgttcataatcccaatggagcttggctggtggtcatcaagcccgagcaatcctccctcaggtgtacgcaacatgctcagcttcctgtgggttgcagggatttgaacttaggccctcatgacgagacaaatgctctcacctgtggcaccatctccccagccccaagactatccattgatatgctggagctaagacatcactgcatccttctcactagaaactggcatgttctagaaactaaacggaaattctgcacattgacaagtgacaacttcgtggcatcatctggtggtccccctggtccatcctgactgcgagtctttgacaaaccatcaactcctcacatgtgtccttcctttcatttcctggatgaaccacctgtatctgttacatgcctctgcatttctgagaggaacagagacccagaccagaaaggacaacagtccaccccaaccatctcaaacaactgaccagaactaaccaacgtctctgtgaatctcaacagcagccaaaacgtcagaatgatgctcaccagacggagaatccgagaacaaacaccttaacgtcccatgcaagccgttaaccacgttggcaatgattcatttttacatgcattctcaatctttcctaatgaggaatccatttgtgatgatttgaataaaaatggtccccatatcccctagggagtggcactattaagaggtatggccttgttggagtaggtgtggccttgttggaggaggtttgtcactggggatggacctgtaggtttcagatgctcaagccaggcccattgtgtctcatttctctctctgctgtctatgtatctagatgtagagctctcagctccttctcctgcatcatgtctgcctgcatgctgccaggcttcccaccatgacgataatggactgaacctctaaaggtaagccagacccaattacgttttttctttttttaataagagttaccatggtcatggtgtctcttcacaacaatagaaaccccaagacaataatttgtttttcaaggaaaaacataaatgagaaataacccaacccaagctcaaacacaccttgagtctggctttcacacattcagtcatgtctagattgtttacaaaaggataaaattatttgcatattcttgtaagagtcctgaaaaagaaatcaaaattaaaaaaaaaaaagcttattctattttaaactcatttttttcctggaagttaacgaagcacaggaagtactcatatttatatttatattttcgatgtttttaaataaactttgattgtcatttgcttacccataatagcattctatctgacctcattcccacagtgagacatgccaggcactgtagtaggaactgcaccatgtcattcaatcttcggacaacacagaaaggtgtgtgctatagtcttgtttacaaggtaataaatgaggcttacagaggtcaagccacttgtctgaggttttttcccagtaggtggtggagccaggagctgacccaagtatgtctatccccacattcccgagcctccctgaaagcaagaccactggcgattagcgctcattgaaagtgagtcctctatcttttaaaacatagtcccacaagcaataccactctgccccattacccacaaccaggctccaacaggaaacagtgtgaggtaattatagcataacccccagccaccagctctagggttttatgactgaactgccaaatcacttctagccagctctgtaggaaatgttcagacactttctcagattccagctaaaacgtcaactgtgtggccctggggagttgagagctcgcagggtggtaatgggatataaaatttgcaaacttgaggtcagtggcctaaattctcgggtgtgaaacagcagtcggccgtgggaaattaaaaactacttgtggacttgaagggtgcgtgtcagggctccccttgcctggcacgtgtccatatcatctccgactttctccatcagcaagaaggatggctaaatggcaggtctgcccagaatcgttgagaagaaaagagtactatcaacggcttgagtcgtgcgttcattctgagtgctaaggactcaatccaattcaaacacagctaacgctcaataaacagttgtcattaaaattaagcagatgttctcccaacgtatgaggggggctggagaagacaatgcaagaatgcaaaaaaaaaatgttttcatcttggcgtgtttaatctcatagatgctaagtacataaatcagtaactggataacagagtatgcacattatagaacaaaagcttaactaccatccggaattgtcctagcccacgccagagctcctgatcctgcacatatggagaaggggtggggaagcagaggtgcatccctccttagactcactccctaagacaactcctgctttcctttagctaccccccaatacttttattaaattgggctcctttacaaaactcctccttccccccaagactgcttaatggagccttctgtcgacagacaggtaaaagtaaatatctaaaactattgcatagtactttccaaaggaaggaaggaaggaaggaaggaaggaaggaaggaaggaaggaaggaaggaaagaagggagggagggaggaaggaagggagggaaggagaaaggaagggagggagaaaggaagggagggaaagagggagagaggaaggaatagatcacagttgggcacagtggcacacacttataatttcagcacttggaaggcagaggcaagggagtggctgacaagttcaaagtcaggctggtctatatagcaagttttaggctaacctagtttacatagcaagttcaaggccagcctggtctacatagcaacaccctgtttccagaaagaaagaaaaggaaagagagaaggagaggggagagggaaagaaaaaaaggaaggaaagtagggtccttaatatgtcagggccttgcttgtgcctagaatattacaagacttgaagacacctgtcaactctccaggatctgaacacaaagagacatgatgcgctacccaacaaccactgcttccagttaaaccagatctgctcctctgtggcctctacagctatgaaataaagaagaaaatatgtacattagcatgtcttaatggtccttctctgggtcttggttagcatctaaaaccttctaaaatgcccctttctatagacatatatcactaactccaccaagaaagcctttaacagtgttcccaaaggggccggtgactccagtcagcaattaagagcacctattgcagaggtcccagtctgtttcctagcacccatgttgtacggctcacaggatctgctgccctcttctgaactcgtcaggcacctgcactcaagtgtacggagctaagtacatacacagatgattaaaaataaaacaaatctcttaaaggcattcacaaagacatagtcttattggggtctttatggtcagacagtcttacaaatagtactgagaggacagctaactgtggacattagctgttacccacaggactttttatacagtaccacattcacaggtgcataacaagccctgtggtaacctgccttccaccgcattcctttggggttcttttctgacttggattgactctctgtcagaaaccctgaagaagctgaaggccacaggtgtgaggatggtgtctatggaaactccagacctgttctgtccagccccaccccataactgaaaggaacttcgctccagaactctctcctcagcttcacctctctcagctcttccttccttcctctcacaaaaccttagttatatctctgttttggaagattcctagtctcccacgtaaacaggctttcttattccttgggatgtatttatttttcttaatagtcaaactttaatacttctattcgccctgttttgtttgtagctgaagttataaagttactctcaaaagaagagaaagctgagtcaatgagcaaatggcgatgtaagagaaggagaaggcggatccaggctcagtggcagtgatgcagtcccagtacagggctgggttttgctgccaccttcatcactgctgtctttggcctctgcctggaatcaccggcatgtcaccacacactccgcctggaaagccactgtaggaaggttcaaaggcagcctggactgcatcatgattagtctgtctaaaaaggaaaaggtaaaagaggaagaagtcaaggaacaaagatggcaatgaggaagaggtgaaaggaaagaaaatcgtccctgggcataggctcttccttaatacagagatcgtcatgaaatttgaccacagaccgagtgtatccacagggctgacataaatcctgtctcccaacaccagtgtcataaatggcggtgctatatttggaattcgatgtgtatatttgaatgtaagtatgacggatggtctaggaattcacagcccttcgaaacactgacccaaatcacttgtctaatggggccgttctcccacccggcctgctctgtctggaatacatttctggctgggaatggtggagatgggggattttcctttctcccttctgctctgaggggcttgagtaaacacgatgagtgatatctttaactgaaaataccacttaagttgagaaagttgcaaagtcacaggaaacttcaagccagatttgctatagtgcagaactcgcacaatccgagtctggctgcagtcctgatctgtttttcttcagtggcgctgtggtcactcccactagaacaagcgtggtgcagtccggttccttgacaagatcagctccactggcaactacaaacctactgctggttatgatctgtaacccctggttccaaaaccaaagcatacacaaaaccaaaatgggaaggattgtccaacagatggagaaacatgtggctaggaaaggaattgaaggcagaatcccacagaaaagcgaggccaacgtgctgaacacgaactgggcgtggtagtgcgcacccttaatcccagcactcaagagacagaggcaagaggctctctgaatttgaggccagcctggtatatagagaacgttccaggacagcattaaagcctgtcttcaaaaacaaacaacaacaacaaaaaaaaaaaaaagaggagaagaagaagaagaagaagaagaagaagaagaagaagaagaagaagaagaagaagaagaagaagaagaagagaggaggaggaggaggaggaggaggaggaggaggaggaggaggagaaggagaaggagaaggagaaggagaaggagaaggagaaggagaaggagaaggagaaggagaaggagaaggagaaggagaaggagaaggagaaggaggagaaaaacaaagtggtttcacatcagagtttccactgaatttcataattctaaaggaaggcaaaaagggtgtgtgtttatgtgcttatatgtaaataaactgtaatctcatttctgaaggccatgtgtgttttcagtggggagctgcgcatgaggcggggatactgctcttaaacactggtccaatagaactgtcctggcatgttatccatggggcattctcactccgaggccacgcagcaagatacgccacacatcacagtctcaccctcagtggaaaacagggatcagatcacaccagaattcaaaccaaaagtactgagttatctctttcaaagacccactgcttcaatctgcacactcgtctctaactgtgctcacaagagtccctccttaccttgcagagacacactgctcctctagcacaaaggcagcatctgttgtccaagtccttgaatctgggcaaagcccgtgacttccatggaattcctggtcatataatttcaggctaggtttgaagaaaatctagtggcctccatgtgcgtgttcctgggagacccagaaccactatgtagagagtctggctttgtttctggggagatcatgcagaaaggccaccaatggaagacagtccgagaccacaggaagtgggctgaggaacgtagccaacccttggagcacatgagcccagtcaagctcagccagtctgcagccatttgagttggcctacattcaggacacggggatccaatatgtcaccaagaagcagcgccaacagacacagcctgagcaaagcctagctgtgtatggtgggctcagttttcccattgacaaaaacatacttaatggctcctggggactgccccaggccagagattacatgagagagctttaaaacctgagaaccagcggggcgtggtggcacatgcctttaatcccagcactcgggagtcagaggcaggcagatttctgagttcgaggccagccgggtctacaaagtgagctccaggacagccagggctatacagagaaaccctgtctcgaaaaaacaaaacaaaacaaaaaaacaaaaacaaaaacaaacctgagaaccccccaccagagcccaatgtctttatttctctctatttagatagctcagacatgggagcctcctgctgtccctcaccctgaccaccaggcactatgaggagccaacacgggagtctctgtctatattgctgacccacagaactgtaaagccaggtattcagagcaacttcctaatagcaaaagataaccaaaccatgaataaaagtcatgggaatcccagggtgatcctgtgtgctcttcttttaagacgaggtatgagctattatgtcttcaacgtgtgagaaatttaatttatatgtggtaggaacattctaggttctcttctcctttatctcttcccaccagctgttcagttagacctggagcaatgtgagcatcttcttcatcaccaactcccctgcttttgctcagtctactctcggtgaaccccacattgctcccgagactcccagcctctggtcctcttacaccactgcatggctttcaccccactgcttccgtaccacagagctgaccttgctgccatcttggagccttcctcatcctagcttttctcagcaatgaggagtgtgatacttcttctgattccctctcctgcccttaacagcatcgcctctttgttcaggctcacaaggcagcaaaccagaccacactgaacggtgccagtagatcagtgcagtgcaaacctggcctcctgtgctgggtgtctgtccccctcccccatcccaaatacttcacatcctcttcaccttatgtcttcttccctcatcttttctctttatgcccatttcctgtttcctctaacctctgatttatataattagcattgcacagtcagtcagtcaaaattggttcatatctaagcatccacaaccacctactgacccctacccatgcccgattcctaagaactctcagagaagtgaagcacacaaggcatgaacctctccaccacctttttcctgcagtcagaggctgtgaaactatctctgtaaagggacagacagcaaatacttccattttgcagatgtcccatctcctctgtcacagctgcgtcattcaggggctgcacagagtaggcggccctgcggtaacatatgcacaaatgagtcgacaaaactccgttctcaacgcagtctagtccacagtctgcagacacagtgaattttactgtgatatcttttcttatcaatccctttccgacaatgcttctgttggcctgtaacagaatacaccttcaactacccaggagatcatcctagggaaagaaggtaccaagaagactgaagaaagacatttaccagctataaaatttaatttagccgagaagcaacaaaatattaagttaaaagttttgcgaagccaggtttcctaactctagttgatttccctggggtaatgaatggaactctacattctttgggggttttttccaaactgttaaatgtgcaaagacgtttaatctccctagtaaggagttataattgagtaattaatactactaaagtatgattgtcgtagatgcaccaaagcttgctattttagcaataattgcttccatttaatattaaaaaattgtgagtttgcagataagctatacaaaaaaagtgaagcaaatacttacataattcatctttgccagctaaaatgtaaactacacatcagcattcctggaaagagatatgtgttgcttaactctacttgagagagctttcctacctagaaatggaaaataagagattctggatgataaaattaatatgtaatacaatcagctcagaggctagagagcacagaaaggtatatctgagatggttactaccgccttagtaaatatgcgagctctaatattaaaaaacaatatatgcaccacccaagtccttgatggtactggcatcttatgattctttctagtttattaatatctgtctgaagtctcaaaacatttttatttaactaagtaataagattatccatacttaggatttttgaactattactacagaatattagaaattttcagtggaattttaccaataacttagccctgcatcttatatcttagcccattgatgaaagaaatcaaaaccacaaaaaaataatttttaaaaattgaatagtaagactttgtttatatttgtcaggatgagtggatggatcagactgctctctcctagaaatactgcatgaattagatgaaaattatatatgtacttataacatatatagagcagtttctgcacataaatgcttattaagcaatgcttcatacactattattacatagggccctaagtcactgtttagagatacaatggttttaatgtataatgctgtgaaatgggtacatgcttaatagaaactatattcacgtagttttgatttcccctgccctgccttgccctgccctgccctgccctaccctgccctgccctgccctgccctgccctgccctgccctgccctgccctgccctgccctcacctccaggatgaccaatacactctctcaaagtccttggcagaatttatcagtgcttaacttcatcaaatcaaggagaactatgctgcagcagttgttcagcctaatagcagactctctgtttttggctgttcttctgttaatggtttttttggtcttctgtaaactatgaagcccctccaagctgtgtgttgttacacgtttctggaattccactgaactaagtaaacactgggtttcaataaaggctttcagaattagtggtcctttaaaactcatttaatgatattagtggttttattagtgctgttatgagttatgattgatgatattatgatttgactcttgcctttgatgattttacaaattaataggaaagaaaatcgagtctagggtctagggagagaccttcacagcaaaacgtgggcttcagttcaatccctaacatcaactcaacaagccagacaggtagtgcaaaacgggccctacagccctgagaggcagagacagacaatcccgggtgctcactggccagtcagcatagtctaaccagagaacaaccccagcttcagtaaacaaggtagatggctcctgagaaatgatgccttgagctgacctctgacctctatccatacatgtgccggttcaccacccctcatcacacacaaacacacacgtacacctgcacacccaagaatacacacacccatatatgtgaccacacgagggataataatcatgaaacaataaatgttcacagactttttgtgttgtgtttgatttattattgatttcagctttctcgaagagttttattaaaataagcccatttgctgggcagtgcccagaatcaaaggagttgttaaaatagtttacttgtcttccaaaaaagcattcacagtaaaaaccaaagctaaagcttccagagtgtcccagtaagctatttggttttgaatgaatattttaattgtttggcattttgttggagtagttatgggttattagtataatgctatgattttcaacaaaggaaactttcaatattatttaaaattccagttaagcttgaaggtgtgccaggcagtggtggcacataatttaaattccagcacttgggaggcagaggcaggtggatttctgagtttgaggccagcctggtctacagagtgagttccaggacagccagggctatacagagaaatcctgtctccaagaaaagaaaaaagaaaagaaaaaaaagcttgaaggtttgtctagacttgcattgctgtgcactctcaaattgtgacgctgtatgttgatgtgtgtttttattcatttataccaatagcttactcatttctttaaactctctatgccctaaaggcatagatgaaaagtcaaatattttatcttttttatttaaaaattggaattacataagccttctgcttaagaaaatctgttttttaacttgtgtcccaatatattagcttcctctgctcataaatgtgacgacaaaagacagtgtcttaacactgtctttatgagttaaacaggcttttcaaagcctcattattcccatgaaacttcattaggaactcagttctgtaattaatctctggaatttgccatcacataatctaccttgactatgagctgttccatatgtttttatagtaataaaaactctggacaatgtaaagaaataaacaaagaccaaaaagaatcatgagaagggtgacaaagtttgcaaaacacatgggagtcctgtcactgtcaacatgtcagtctgtcagcctgtcaccctgtcagcttgtaacagcctgtgtcaacctgtcagcctgtgtcaacatgtcaacctgtcaacctgtcagcctgtgtcaacctgtcagcctatcaatctgtcagcctgtcagcctgtcaacctgtcatcctatcaatatgtcaacctgtcagattgtcagcctgtgtcaatctgtcagtctatcagtcaacctgtcagcctaccagcctgtgtcaatttgtcagtcaacctgtcagcctgtgtcagtctgtcattctatcagtcaacctgtcagcctgtgtcaacctgtcagcctgtctacctgtcagtctatcaagaaccagcaacaaggacacaagactcattccctattactggagacttgggaaaaggagtttcagactaaggaatgtctccctttggcataaaactgtaatatttccttatttgggcactaaagcaataaggccatcataaagaaagggcgtgtaactcctctttccaactagggctggcttgttgcttttcttgctattgttgtccttggtgatgctgggtgtgtactactgagccatcttccactttttacccaatcctggtgttaaaatttagctgagaaaagttcttacgaactgaaatgcccacagttatgactgtgttatttctcatcaagtctttttacatacggccatgcaaaagaaaactactacatgcatttactatttgaaaattatttttacgcttgcaaactctgggccagtgagatggctcagtgggcaaaggtgcctactgccaaatgtgacaactttagttcaatacccagaacctaatgaaggagtgagagattcaatgtctgcaagttgccctctggacacacacacacacacacacacacacacacacacacacacactgtgttgcccaaatacatacaacaaataagtataatataaaaataaatacagattcaaattttctgtggaaaatgtttctgaggaatgtttctgaggaaaatgtttctgaggaaacatggtttttactgagcaaatggggaatcaccatattttttaattgaaagagagagagagagagagagagagagagagagagagagagaggaaggaagaaagaaagaaaagaaagacattttcccctaaaaacaataattggcaatttgttccaagaaaacatagcaaaagttggggtggggactgaggatgcttaaatttccacagtggaaaaacttctgctgcccagcaagaagaaaaagggaagaaaacacctgcaatgggaatcaggagaggagacagacttgggtggcatgcctagtgggggtcaggttctccagtttgcacagcaagagacacctgataggaaaagaacgcaggacttggagctggtaccatcatgtcagaggaaaagcagagggagttgggtgtgggcaagcagacagcccatgacagacatcagtgtgtaaattattagcgaggtgtcaaaagtcatcacctgtgtttcacataagccttggggactacaaaccacctccacttcagaaacccagcacgcccatccacacaatgagcaggtgtcagcgtagttagaggtagctttgaactacacacgttagtgaagacaaatagaaaccttataactggacaaacaccgtgcatagtttgctcttcttatggtttacacagcagaccatggctgagagactcttcatgtgagactgtaatagcagtgagcaaagagaaatttcaaaataagcacctgaatgggtgtgttgagaacctaggaaaaactttgatccggcagttctacttggatcacatataagcttatgcatagacatgtaattacacagaaagatgttgttaatagtgaaagatttactataatctcaagaaccattatttgagacctgtgccaccatatcatgggactctacaaaccaaaagaacataagttaacagttagatacactgaaaatatataaaaagtgaaggcacatattatatacagcacatccatgtagtaaaacatatgcacatacatatgttcaaacatatatgtatatatgtatatatatgtgctgcatatgtggatatgtatatatgtttataattttgttagaaaaaatgtgtaatgtatataaaaagcaggagagaagtacttttaattgtatatcgtttaaagtaattttaccacagccatacatagaaatagaggcagaaaaccttaaaaatatcataagagctaggaatactcatagtagctgttctactaatactatgtgttttaaaaaaagatttataaaaattgcaatgggggctggagagatggctcagcgggtaagagcactgactgctcttccaaaggtcctgagttcaaatctcagcaaccacatagtggctcacaaccacccgtaatgagatctgatgccttcttctcgtgtgactgaagacagcaaaagtgcacttatttataataaataaaatcttttaaaaactgcaatggacaggagtctgtcagatcaggcactaggagaagtacagacaataactctatattcataagctcatgtgaaacccaatggtgtggcaaagtgcagctctgtcagcagagaagggacacctctctgtttgtcaggttgtcttctcaaaaagagacatgcaaattggtaacagaagcacactaagatccggcaaaactctggccttaagacttgcaacccagagtgaaagatctccctcgctctctctctctctccctctctctccccctccatatatatatatatatatatatatatatatatatatatatatatgcatttatattggcatatatatgagcaatgccatcacaatagatactaagatgatcttgtgcagcagaaatagatttttgaaagaaagatgctgaaccaaacaaaggcctcttgagaacattaaaatcaattttccacccatttactgaactcttatcaagtcaggaaaaatgcacccctagaatgacaagaaacttcagcatgtgcactcgcttgaatcattgagcaggctcttccaaaggacagaactgtggccgtttatttctatcttaccacttctaatagagactccaacttaatctcagagattgtcctttttaaacgattaaaaactcttaggggaattatttccatctccttcagctccggaaactgccaagccttagacagccaacctgaccgatttaagtcatcccagctgcaacactagggcatgggaagctgatagtacagggctttccaagaagataccgcatgaacacccatttagagccagccacagctgcatgcagagctcacgcaggccggacactagtgttcaaaaccctctgccttacaaacttccagggtaggtgtctgaacgcgagtgtacagctctggttttcatgagaatgacttaaaggaaggaccatctcctgaccacgcatctcatctcagtctctggattcttccctttcagcgatgcctcccaaatagctgatgcccacacgggaaaagcacttctccctgcaactggaattggtaagcagcagaagcagtgggcttctccctttctctgggtttcagctcctccccttcttccacaaggaaccattctcgcctccccaaatctgcttcaacaatggcccaggattccctccagccaggacttctcctctgggccaggaacaaggcgagttatctgaacaagagttgatgaccgagtaactttggcacttccaggctgtctcccggggatctcacccagggtcctctacgggccagaacctgccctgtcagttgctgtggatcttaaagtcccaagaagggcgaggggaggcacaccgaagcagctgggagcttcccttaccctttcagcgcatcgtgtcctccgccgcctcttctcttggcccgattggctctggtctccttcaggctcccagcctccaaattggcgtccgccccatggctcgtgtaggactcgaggagcagggcgaacgccagcgcgacctccagcagccctcctcgccgcatggtgccgccggccgccactcgctccgccgccgccgccgccgccgccgccgcgccttccagcggcccgagtctccggggtcccgctgtctcactgtccggctgtcctgatgcagagaggtccccggcctgggtcctacagctttcttctccagggactgctcccacttcgggtagtccctgcctgtcctgcaacacagacaagtccccaaggcggggaggtgagacactcagggctccgggatgctgaaagctcgcagtccccggtgccgagcccagaccgcgcgccgcctgcgcgtggcgcagttactcggaggaacgaggaccactcgatcccaactagctgcagagccagaacccggcgactggcatccgcggaccctgtggcctcgcggcgccaagtaccgtgtccctagggagcccaggcgtcccgcgagcggactgcctacacggtcttaatggcactgattgcgcgcggtgacggctgacgccccagctctccaaaaagggtcctctccgcccacataccgggtcatggccaaccccgccagtcccctgcatccgacgtggagcagggcactgcagtcccggatcttgcagctgtcaggcagagagggccagctgcagatgctcgagacatcccctcaccctgcccggcctcctgccctggatgccgcgcaaacggccctccagccacccgcctgccgcccgaccctggcgggaccccatgagacccactggactagcggctcggactctcaggcggcggtggctgctctgctccg

SEQ ID NO: 10 - DNA, 11953 bp, Mus musculus
  source 1..11953: mol_type = other DNA
aagcttgccttccctgtcgatcacctgctgtgcaaagggactgaaactcctggcttacttgcaagtgattctgattcatccgtgggccaggtggcacaagtgttcaatagctacttcttcaatgaatggttctttatttgacgacatttggagtatatgtgctcacttgtgcgcatgcgtatgccgagtacgttggtcagaggacacattcaggagtctttccttccttctgccaggtagttcctggtgctagaacgcacgttaccaggcttggtgctttatttgctcagagccatctcctggccctcgaatgaatacctcttttctcacctgaagatgtaggacggaatctccagttcatggatctgttaagaggatttttttttgaaagtaagacctcaattaaactagataatatatttaaataattatgaatttaaatcagtgtttaagtcttcctattcaggtatcgaagcagtgcagtgagtccattatcatgaggcgtggtccattttgaaaagaagatggagttgataacatgcctcgatctctataatctcatatccgggcacaagatgttgaaaacaagaaaaatccgggtcaacaagatgcgtgcattcttagggtaactgtgtggaagtgacagttggtgactggagtccctggtcctgcggtcgagcccgatgtggatttcagacacccccaccccaccccaatcccatgcatgtgtgtgtatgtgctctctgtatagtgtgtacacatgtgaaaatagggttattttaggaaaccccattcctaactgagagttgggcgggaggattgtctgaaacccaaatcacaggcccccacatcacagactgagactttcgcagcctcttcatttagcctaggtgagtagcttgacctgagcctcgggagaattgctcctccagcgggctcctgacactggcatgcccctttcgccgccgctaacctgttggctggctcagtggtggtggcctcaccacaagccctgcctgagcctcggagcctacaatttctcctcccagccagacagcagaagactgggctgagaagcgagggccactgcacagagcccctttccagccagggcctcctgggctcgttggcaaggtgtccagcatgcgttctccgcgcaggtggcccagctctccgtgcttctgatcgcgggaatctcgggtctggacctctcagccgcaggcagatcggtctaaaccgctactccacctcttcccattccctctcttccccaccctgggacggaatatcccaggccaggcaggactggatcacctccgcctcctcccagggcactgatcctgcgaatgagggagcgcgggtccgggcggtggctggcagaggggagtggaaagggaggatagatggggccgggggtggggtggtgatggggggaggtggggagggcgtcattttctttttctttctttcttttttttaaaaaagtatttctctcgcgagaaaccgctgcgcggacgatacttgaagaggtgggaaaggagggggccgcagagttggggcagagactgtgggtgccacaggcggccacagctgggacagctgcggagcagagcagccaccgccgcctgagagtccgagccgctagtccagtgggtctcatggggtcgccaggtcgggcggcaggcgggtggctggagggccgtttgcgcggcatccagggcaggaggccgggcagggtgaggggatgtctcgagcatctgcagctggccctctctgcctgacagctgcaagatccgggactcgagtgccctgctccacgtcggatgcaggggactggcggggttggccatgacccggtatgtgggcggagaggaccctttttggagagctggggcgtcagccgtcaccgcgcgcaatcagtgccattaagaccgtgtaggcagtcgctcgcgggacgcctgggctccctagggacacggtacttggcgccgcgaggccacagggtccgcggatgccagtcgccgggttctggctctgcagctagttgggatcgagtggtcctcgttcctccgagtaactgcgccagcccaggcggcgcgcggtctgggctcggcaccggggactgcgagctttcagcatcccggagccctgagtgtctcacctccccgccttggggacttgtctgtgttgcaggacaggcagggactacccgaagtgggagcagtccctggagaagaaagctgtaggacccaggccggggacctctctgcatcaggacagccggacagtgagacagcgggaccccggagactcgggccgctggaaggcgcggcggcggcggcggcggcggcggcggagcgagtggcggccggcggcaccatgcggcgaggagggctgctggaggtcgcgctggcgttcgccctgctcctcgagtcctacacgagccatggggcggacgccaatttggaggctgggagcctgaaggagaccagagccaatcgggccaagagaagaggcggcggaggacacgatgcgctgaaaggacccaatgtctgtggatcacgttataatgcatactgttgtcctggatggaaaaccttacctggtggaaatcagtgtattgttcccatttgccggcattcctgtggggatggattctgctcgaggccaaatatgtgcacttgcccgtctggtcagatatctccttcctgtggctccagatccatccaacactgcaatatccgctgtatgaatgggggcagctgcagcgatgaccactgtctgtgccagaaagggtacatcggcactcactgtggacagcctgtctgtgaaagtggctgtctcaacggagggaggtgtgtggccccaaatcggtgtgcttgcacttacggctttactggaccccagtgtgaaagagattacagaacaggcccatgttttactgtggtaagcaaccagatgtgccagggacagctcagcgggattgtctgcaccaaaacactttgctgtgccaccgtgggccgagcctggggccacccctgtgagatgtgtcctgcccagcctcacccctgccgccgcggcttcattcccaacatccgcactggagcttgtcaagatgtggatgaatgtcaggccatcccagggatgtgtcaaggaggaaattgcattaataccgttggatcttttgagtgcaaatgccctgctggacacaaatttaatgaagtgtcacaaaaatgtgaagatattgacgagtgcagcaccattcctggagtctgcgatggcggggaatgtacaaacactgtcagcagctacttctgcaaatgtccccctggtttttacacctctcctgatggcaccagatgcgtagatgttcgccctggttactgctacacagctctggcaaacgggcgctgctctaaccagctgccacagtccataaccaaaatgcagtgctgttgcgatcttggccggtgctggtctccaggggtcactgttgctcccgagatgtgtcccatcaggtcaactgaggatttcaacaagctgtgctctgtccctctggtaattcccgggagaccagaatatcctcccccacccattggcccccttcctccagttcagcccgttcctcctggctatcctcctgggcctgtgattccagtccctcggccaccgccagaatatctgtatccatctcgggagccaccaagggtgctgccagtaaacgttactgattactgccagttggtccgctatctctgtcaaaatggacgctgcattccaactcctgggagttaccggtgtgagtgcaacaaagggttccagctggatatccgtggcgaatgcatcgacgtggatgagtgtgagaagaacccgtgcactggtggcgagtgcatcaacaaccagggctcctacacctgtcactgcagagctggctaccagagcacactcaccagaactgagtgcagagacatagatgagtgtcttcagaatggccggatctgcaacaatggccgctgtatcaacacagacggcagcttccactgcgtatgcaatgcgggctttcatgtcagctcggaggggaagaactgtgaagatatggatgagtgcagaactccgaacatgtgcccaaacggaatgtgtattaatgaagatggcagtttcaagtgtatttgcaaacctgggttccaactggcatcagatggccgctactgcaaagatatcaatgagtgtgagacacctgggatctgcatgaacggacgctgtgtgaacacggatggctcctacagatgcgaatgcttccccggattggctgtgggtctagacggacgttggtgtgttgacacacacatgcggagctcatgctatggaggatacaggagaggccagtgcgtgaagccgttgtttggtgctgttaccaaatcggaatgctgttgtgccagcactgagtatgcctttggggaaccctgccagccgtgtcctgcacagaattcagcggaatatcaggcactctgcagcagtggaccgggaatgacatcagcaggcactgatataaacgaatgtgcattagatcctgatatttgcccaaatggaatttgtgaaaatctccgtgggacctacaaatgtatatgcaactcgggatatgaagtagacataactgggaaaaactgtgtcgatattaatgagtgtgtgctgaacagtctactttgtgacaatggacaatgtcgaaacacacctggaagttttgtctgcacctgccccaaaggatttgtgtacaaacctgacctaaaaacctgtgaagacattgatgaatgtgaatcaagtccttgcattaatggagtctgcaagaacagcccaggctccttcatttgtgaatgttctcctgaaagtactctggacccaacaaaaaccatctgcatagaaaccatcaagggcacttgctggcagactgtcatcgacgggcgctgtgagatcaacatcaacggagccaccttgaagtccgagtgctgctcctcccttggtgctgcgtgggggagcccgtgcaccatctgtcaacttgatcccatttgtggtaaagggttctcaagaattaaaggcacgcaatgtgaagatatcaatgagtgtgaagtgttcccgggagtatgcaagaacggcctgtgtgtcaactccaggggttcattcaagtgcgagtgtcccaatggaatgactttggatgctacaggaagaatctgtcttgacatccgcctggagacctgcttcctcaagtatgacgatgaagagtgcaccttgcccatcgctggccgccaccgaatggatgcctgctgctgctctgttggggcagcctggggaacggaagagtgtgaggagtgtccattgagaaacagccgggagtatgaggaactctgtccccgaggacctgggtttgccacaaaagacattacaaatgggaaacctttcttcaaagatatcaatgagtgcaagatgatacccagcctctgtacccacggcaagtgcaggaacaccattggcagctttaagtgtaggtgtgacagtggctttgctctggattctgaagaaaggaactgtacagacattgatgagtgccgcatatctcctgacctctgtggccgaggccagtgtgtgaacaccccgggggactttgaatgcaagtgtgatgaaggctatgaaagtggattcatgatgatgaagaactgcatggatattgatgaatgtcagagagatcctctcctgtgtcgaggaggcatttgccacaacacagagggaacgtatcgctgcgaatgtcctcctggtcaccaattgtccccaaacatctctgcatgcattgacatcaacgagtgtgagctgagtgcgaatctctgtccccatgggcgttgtgtgaacctcatagggaagtaccagtgtgcctgcaaccctggctaccaccccactcatgacaggctcttctgtgtcgatattgatgaatgcagcataatgaacggtggttgtgagaccttctgcacaaactctgacggaagctatgaatgtagctgtcagccaggctttgcgctaatgccagaccagagatcgtgcaccgacatcgatcagtgtgaagataatcccaatatctgtgatggtggccagtgcacaaacatacctggggagtataggtgcctgtgctatgatggtttcatggcgtctgaagacatgaagacttgtgtagatgtcaatgagtgtgacctgaatccaaatatctgcctaagtgggacctgtgaaaatactaaaggctcattcatctgccactgtgatatgggatattcagggaagaaaggaaaaacgggctgtacagatatcaatgaatgtgagatcggagcacacaactgtggcagacatgctgtatgcacaaatacagccgggagcttcaagtgcagctgcagtcccgggtggattggagacggcattaagtgcacagatctggatgaatgctctaatggaacccacatgtgcagccaacacgcggactgcaagaacaccatggggtcatatcgctgtctctgtaaggatggctatacaggggatggcttcacctgtacagacctcgacgagtgctccgagaacctgaacctctgtggcaatggccagtgcctcaacgcccctggcgggtaccgctgtgaatgcgacatgggcttcgtgcccagtgctgacgggaaggcctgtgaagatatcgatgagtgctcccttccaaacatctgtgtctttggaacttgccacaacctcccgggcctcttccgttgcgagtgtgagattggctatgaactggaccgaagtggtggaaactgcacagatgttaatgagtgcctggatcccaccacctgcatcagtggaaactgtgtcaacactcccggtagttacacatgcgattgctctccggattttgagctgaatccaactcgtgtcggctgtgtcgatactcgctctggaaactgctatctgaatatccgaccccggggagacaatggagatacagcctgcagcaatgaaattggagttggtgtctctaaggcttcctgctgttgttcactgggtaaagcttggggaaccccatgtgagctgtgtccttctgtgaacacatctgagtataaaattctttgccctggaggagaaggttttcgtccaaatcccatcaccgttatattggaagacatcgatgagtgccaggagcttccagggctgtgccaaggggggaagtgcatcaatacctttggcagcttccagtgtcgctgtccaactggttactacctgaatgaagacactcgagtgtgtgatgatgtgaacgaatgtgagactcctggaatctgtggtccggggacttgttacaacaccgttggcaactatacctgcatttgtcctccagactacatgcaagtgaacgggggaaataattgcatggacatgagaagaagtatctgctacagaaactattacgctgacaaccagacctgcgatggggaactcctgttcaacatgaccaagaagatgtgctgctgctcctacaacattcgcagagcctggaacaaaccctgtgaacagtgccccatcccaagcacagatgagtttgctaccctctgtgggagccagaggcccggcttcgtgattgacatttatacgggtttacccgtggatattgatgaatgccgggagatcccaggggtctgtgaaaatggagtgtgcatcaacatggttggcagcttccggtgtgagtgtcccgtgggattcttctataacgacaagttactggtttgtgaagatatcgacgagtgtcagaacggccctgtgtgcctgcgaaatgcggaatgcatcaacactgcaggcagctaccgctgtgactgtaagcccggctaccgccttacctccacaggtcaatgcaatgatcgaaacgagtgccaagaaatcccgaacatatgcagtcatggccagtgcatcgacaccgtgggaagcttctactgcctttgtcacactggcttcaaaacaaatgaggatcagaccatgtgcttagacataaatgagtgtgagagagacgcctgtgggaacgggacttgcagaaacacgattggctccttcaactgtcgctgtaaccatggcttcatactgtctcacaacaatgactgcatagatgttgatgagtgtgcaactggaaacgggaacctttgcagaaatggccagtgtgtcaataccgtgggctcctttcagtgcaggtgcaatgaaggctatgaggtggctccggacggcaggacctgtgtggatatcaacgagtgtgttctggaccctgggaaatgtgcacctggaacctgtcagaacctggatggctcctacagatgcatttgcccgcctgggtatagtctacagaatgacaagtgtgaagatattgatgagtgtgttgaagagccagaaatctgtgccttggggacctgcagcaacactgagggtagcttcaaatgtctgtgtccagaggggttctcctggtcctccagtggaagaaggtgccaagatttgcgaatgagctactgctatgcgaagtttgaaggtgggaagtgttcatcacccaaatccagaaaccattccaagcaggagtgctgctgtgctttgaagggagaaggctggggagatccttgtgagttgtgccccactgagccagatgaggctttccgccagatctgcccctttggaagtgggatcattgtgggccctgatgactcagcagttgatatggacgaatgcaaagaacctgatgtctgtagacatgggcagtgcattaacacagacggctcctatcgatgcgagtgtccttttggttatattctggaagggaatgagtgtgtggataccgatgaatgctctgtgggcaatccttgtggaaatgggacctgcaagaatgtgattggaggttttgaatgtacctgtgaggaggggttcgagcctggcccaatgatgacttgtgaagatataaatgaatgtgcccagaatcctctgctctgcgccttccgctgtgtaaatacctacgggtcctatgaatgcaaatgccctgttggatacgttctccgagaagacaggaggatgtgtaaagatgaggatgagtgtgcagagggaaaacacgactgtactgagaagcaaatggagtgtaagaacctcattggtacctacatgtgcatctgcggccctgggtaccagcgcagacccgatggagagggctgcatagatgagaatgagtgtcagaccaagcccgggatctgtgagaatgggcgttgcctcaacaccctgggtagctacacttgtgagtgtaacgatggcttcacagccagccccactcaggatgagtgcttggacaaccgggaagggtactgcttttcagaggtcttcgaaaacatgtgccagattggctcaagcaacaggaaccccgtcaccaagtccgagtgctgctgtgttggagggagaggctggggactccactgtgagatctgccctttcgagggcacagtggcttacaagaagctctgtccccacggccgaggattcatgaccaatggagcagatgtcgatgaatgcaaggttattcacgatgtttgccgaaatggggaatgtgtcaatgacagaggatcatatcattgcatttgtaaaactgggtacactccagatataactgggacttcctgtgtagatctgaatgaatgcaaccaggctcccaaaccctgcaattttatatgcaaaaacacagaagggagttaccagtgttcctgcccgaacgggtacattctgcaagaggatggaaggagctgcaaagatcttgacgagtgtgcaaccaagcagcataactgtcagttcctgtgtgttaacaccatcggtggcttcacatgcaaatgccctcctgggtttacccagcatcacactgcctgcattgataacaatgagtgcacgtctgatatcaacctgtgtgggtccaagggtatttgccagaacactccaggaagcttcacctgtgaatgccaacggggtttctcactcgatcagagtggtgccagctgtgaagatgtggacgagtgtgagggtaaccaccgctgtcaacatggctgccagaacatcatcggaggctataggtgtagctgcccccagggctacctccagcactaccaatggaaccagtgtgtagatgaaaacgagtgcctgagtgctcacgtctgtggaggagcctcctgccacaacaccctggggagttacaagtgcatgtgtcccgccggcttccagtacgaacagttcagtggaggctgccaagacatcaatgagtgtggctcatcccaggccccctgcagttacggttgctctaatactgagggtggctacctgtgtggctgtccaccaggatatttccggataggccaagggcattgtctttctggaatggggatgggccgaggagcgccagagccacctgccagcagcgagatggacgacaactcactgtccccagaggcctgctatgagtgtaagatcaacggctacccaaaacgaggccggaaacggagaagcacgaacgaaacggatgcctccgacatccaggacgggtctgagatggaagccaatgtgagcctcgccagctgggatgtggagaagccggctagctttgctttcaatatttcccatgtcagtaacaaggtccgaatcctagagctcctgccggccctcacaactctgatgaaccacaacagatacttgattgaatctggaaatgaagatggcttctttaaaatcaaccagaaagaaggggtcagctacctccacttcacgaagaagaacgcggtggctgggacctactccttacaaatcagcagcaccccactttataaaaagaaagaacttaaccagttagaagacagatatgacaaagactacctcagtggtgaactgggcgataacctgaagatgaaaattcagatcttgctgcattaattcaccatccaggagccaaataattaaatgaaaaagcaaccttaggctggtagaattatattttccccaagccagaaccttcacatcatgggtacaattgttcaccagatcgatctgtataaatgagcaccactcttgaatggcaacacccaggaggtacagtgatgatctagttcaaccaaccacttctcaggcttctcgtgagtagctcagctaccctgtcatgcgtattgattcctgaaaactgggacatgaatatccgctgaggttggccattcacgccgatgggctatcttcccagcctccgcacaggaacgcgcttccatctgatggactgttccgcgttggtcttcagatcttgaaactttgcttctccgagtgcaagcagtaggtttctgttgtctgtttggtgctagtaaattctcaaatagattattgatgcactgtaataagacacgagttaggaaccaaattgccaagtactcagttcaaatacttcatttcaatcaaccaaagttagttcagtagcttatctcacttatgagtatggtgcagtacatgtaaattaagtgtgtgtacactgtaatcgtgctattttttatcattgaaacatttataaactacaataataaagcccttaatgtgagggtttgtaatggtgcttattaagaccaaagacttgttaaacatctacaccaaatggtagtggattctctgagactggcccacttgtgcactagttgggaggaacaaggaagcagcctcagccaccagaggatcaccaccgcatcctccatcacacagcatgtgcaatacgccaaaatcactctcagtcattcctgtcaacaaggggttaatgtcatgatgtcacaataaagtgatcctcccctccctccccattttagtttacaccttggttttatgttcttgtgtggattaaggctggaggggcctttct

SEQ ID NO: 11 - protein, 890 aa, Mus musculus
MAQFYYKRNVNAPYRDRIPLRIVRAESELSPSEKAYLNAVEKGDYASVKKSLEEAEIYFKININCIDPLGRTALLIAIENENLELIELLLSFNVYVGDALLHAIRKEVVGAVELLLNHKKPSGEKQVPPILLDKQFSEFTPDITPIILAAHTNNYEIIKLLVQKGVSVPRPHEVRCNCVECVSSSDVDSLRHSRSRLNIYKALASPSLIALSSEDPFLTAFQLSWELQELSKVENEFKSEYEELSRQCKQFAKDLLDQTRSSRELEIILNYRDDNSLIEEQSGNDLARLKLAIKYRQKEFVAQPNCQQLLASRWYDEFPGWRRRHWAVKMVTCFIIGLLFPVFSVCYLIAPKSPLGLFIRKPFIKFICHTASYLTFLFLLLLASQHIDRSDLNRQGPPPTIVEWMILPWVLGFIWGEIKQMWDGGLQDYIHDWWNLMDFVMNSLYLATISLKIVAFVKYSALNPRESWDMWHPTLVAEALFAIANIFSSLRLISLFTANSHLGPLQISLGRMLLDILKFLFIYCLVLLAFANGLNQLYFYYEETKGLSCKGIRCEKQNNAFSTLFETLQSLFWSIFGLINLYVTNVKAQHEFTEFVGATMFGTYNVISLVVLLNMLIAMMNNSYQLIADHADIEWKFARTKLWMSYFEEGGTLPTPFNVIPSPKSLWYLVKWIWTHLCKKKMRRKPESFGTIGRRAADNLRRHHQYQEVMRNLVKRYVAAMIREAKTEEGLTEENVKELKQDISSFRFEVLGLLRGSKLSTIQSANAASSADSDEKSQSEEEITRQQAAGALERNIELESKGLASRGDRSIPGLNEQCVLVDHRERNTDTLGLQVGKRVCSTFKSEKVVVEDTVPIIPKEKHAHEEDSSIDYDLSPTDTAAHEDYVTTRL

SEQ ID NO: 12 - DNA, 162452 bp, Mus musculus
  source 1..162452: mol_type = genomic DNA
ctcccccgcgcccctgctctggctctccagcatcctcactccgcccagttctgtgccagctgcgtgggctctggtttcgtgcgggtttttttcccccttggaatgctccaaaaaactcggtagcgactacggaaaccccatcggaactgaccagctgcgctagcaccaggcacagcactggtgctgcgcgctcgccgagcccacctcggtcacttcaaccaccagattgcaactttgcgggtaagagagggtgcaggctccgcgctccagacgcgggcctcacatctgggatactgattaagtttcctaagccgactgggaagcaggctccctgctaggaggcgggtatccctgggggcttacgcgagtcaccagggtgcagcagctttttaaggttcttcttctttttaaaaaggttgcttttttaaggttcggggaaagattttcgcgaagctttctttggatgacctgggataagggggagtttgggggtgcttccaggctctctctgtatcgcgttgtgaggcaggggtgaggacgaagagcgaacccccggtgtgatttacatggtaaacaaaggatcagcccttatccccgcggtgctggggagctcggtgcttgtgtacaacctcccgtgcgcgtttggacgtttggagaggatggaaatgacatggtccttgggcacgtaaggtgagctctatgactctccaacgagctgagggcacgaagggaggacagcgaccgctgttcagtgggttcattcccctctgcgtcattttcctctgtcaagcagcaaaagcacttttaagcttgtggttggaccaggtttgggggttcctagttcgcttggcaactgagattccagctgaaccagtgactctgcttgctacttgagtagatagcttgaatccatggcgcaacttgttgtttccagctgcgaactgccttttgtgactccagagagagacagagaaagatagagacatgagggtggaggtgagctgggcagagggaccaaagaccatgtgtccagtgttctccagccactgtggtgtatccctgcccactgcggtttttcccaggggagcattatcattaaataccgctggctgctataaaaggttatcaagttacttacggagggagtaagctactaagccaaacgagtgggaagagagagaaaacgctgtcactgtgcctttaaaatgaaatcttcgaacagatttgtaaaactgtgataaaataaaccaccgaggttcataggctcgctggcttttctctcgtagtcatcacaatgcaaagtacttaaaaattctttaggaagaataaaagatttagcagaggatttttttttaaagactcagacaccgagagtaggagttggcggttatgttaacggtgttacgatttgctatttaaagttatatttgtaacgcctacttctgttcatctggacagtaaaccaggaaacatccagctcttaagagaaacaaagtagtaagatataggggtaatcctgtccgaaactcagaattaggatcaaaattgaatttaacgtgggtaaagtgaatgaaggtctttacaatctctgcaaatcaatgctgtggttaaccaggatcaatcagtcagcccgggcaaggtaaatgggcatcaaaggatatatgaataacttggattaaaaagggtagcaaggagagggagggagagtgcatgtgcacggtttcagagaaagactgcaaggagcagctttgccttgcctgaactttgatctgaatctttacactgactggtgggaggaggaggaaggatagacttaagccaagaaaggcaaaggggccaaaaacctacaggttggtgaaagagagacatcagagttgcccatggtcctctgaggggatatatcacgaggaaaagatttgcaagtgtgaacttagaaaagtttatcagtgtgatctggaaggagcattcatcagaagcatcaggtatcaaagctggacaggaaacaaacatctcttagctgaagctgccacgcattgatagcttttgtaagaatctctgatcttaagaaatgaagcacatctcagttttcttcttttcagtcattctcagagatatgagagggactagatttataaggcttccatgttttaaataatcttatattattcatatttgtgttgcatttatttctagacagccaagatgaaaagagccgacgggatgtgtaaagtggctgtttcaaagaaccaaacagtctcgggatagatagcttttcacagagtagaacctgaatcagttcatattttatagaggcttggaaccatgaaaactgtccgcctatcctttctgtttagtggacctttgaaggtcattcttgtttagtgtatgtgcttcaaactccaagaaccgcatctaaccaaagagctaaaaacctgtctggttaagcatccacacccagaggacagaaacgcatcatggttcataacctattgtgtcatttcatgctataatggatatataaggccaatgggctgtttttcagtgctctgtgatcctgtctactggtatttgcctgaagtacatggcactaaaacctgacttgcagtaactggccttaaaaatcattgttcctgaactgaagatgataagcagaaactacacacacacacacatgttgcattttgataccatcattttttatgatacaaaataataaacctttctgctcatccaggcatcctcttactatattttaaacccgagtcaatgaagagctacagtctctgtaatagtctctgcttgttatttctctgattaaaataaaacctccaagtatgcttttggatatattctgctcttattcccacatgcttatctccagaataacatgccaattcaatgaaaagattaacatgaagtccctttgctacataatggctataccctggcaacgataaagataagcatccatgtgttcaataataaaacttataaacaacagagaaatcagaggttatttatatgaaggtggacgtgcaagaatgacagagcagtcaccgggaccacaaaacagggctgaatattttcttttttaaaaaaaaattttttttaaacaagctggatgaacggagggagaatagcagcaggctgttatattttcttctaaaatcatcagtgccagacagtgatgagatcagattacaatgcgcatcttgacttcctaaattcgttgtctgggctaattagaacctggcctcactgacttatttaatacccataaaatgccatgagctttcattacaatgactcttactaacactgaagttgagaggacacacagtgaagcccgtggctgtgctctgttcatctcatgttccataaaccttcagtttaacccaactgtacttggatatttatttccatcatgttacggaattattggctttacggtggctttagtctccccaagttttccgtttctcatcctttcccatgcacaactttaccctttccagagagagagttgagagtatgtatatgcacacacacacacacacacacacacacacacatgtatgtatgtgtatatctatctatctatctatctacacacacacacacacacacacacacacacacacacacacacacacatatatatatatatatatatatatatatatatatatatatatataaaaccacagacagaaacaacatggctgtgttttcaaaatgagcacaaacttatacctgatcattgagaactttcacacaacaaccatcacaacaccaaataactgagggacagagagatcaatttagggagaggaaaaggtcatctagaaaatcaaaaggtattgaacgtatattaatttaaaattatcttatttcatgaattatttagaaaattcaatgaagtagttaaaccttttaaatagctctgtgatggttctgaaagtttggtttaagtagttaggcaggactgcagttggactatttgattattgtagccaaacactacacagtattccttccaacattagcttgtgcataacacactggtgtcactgggtgatgacttcctaagatacaacagaatatatatgggcacagctttatgccccaaacatttaagatgaatttagatacaaatataaaagtatgcctttacctagcacaaagcatcttctttgaggagtagtaaaattaatgataggcattaattaagtactgcctgaagcctgctctccccctcctaaagtatgttggagaagctaccctgagtaatgctttgagccagtaacagggagggtgaagtgtacagaacctagaggacaaaagagttgaagaagggcggggcctatacttctgggcacctgtgccaggagttcattatcttcctttccgttttgaatttggactgtgatcatttcttagcaatttggataataagcacttcccagacaccatagtttaactctatggtgaatcagtgatttgaagaaaaaaaaaaaaaataccgtgcaaacctgtagtctaagcactcgggaggctgaggcagaaggatcttgagttccaaagcagcccaggctatagagtgatagcttatgacaaaacacaacaacaatgcatgcacatacacacacacacacacacacacacacacacacacacacacacaacatatatacccatacacacatatgcatacacacacatatacacacacatacacacacaaacacacacatatgtatacatacatacacacacatacacacacacccaacaacaatagaacaaaaatgaaaacaaactgaagaaaacaaaaaccaaataaacaaagaacaacaacaacaaaatcctaaaaaataattatatttttaattcttccctaaaaactaattgtatttttccaacaattcgtttctttgtttttgttttgttttttcaaataatataacatgggaataaaatccctgttcctcttaccaaggtagagttagaacaacattcctgaagccaaataggagctgagctgctcagctctgacaggctgccctctctgttttccttgggctggggattgaacccggggctttttagatgttgcacatacactccagcaggaccccagacccaggcaccgtgtttccgttcttgttctttaacataatacacatggaaaagaaagtttatttccatgaataaaatttgagataacacatttttaatcagatatcaaggagaagagagcttctgagatgagtttccactcaaacctcagcactccttaactattcaccgtatgccggcatggacaaaacagtcaagttaagacatgctggagttatattccattaatcaatgttatatagggtgttaagacaaatggctttgtcttcactatttttgaaaatgtaactatttatttcatgacctttggtatttgataccctagaagatacttgacagttgctaagatgtttttagtactttgatgtggtgtttctaagtggatgcatacttttgagatggaaagattatatacagaatctattggcatgcactaaaagacaacacctttgaatgtatgaaatattaatctgatattaccacccacttatatacttagtgcctattagtaaacaaataattgaataggcaggcaggtggcaggtaggatcatgaatgttctggtagagttcttgatgtctagagtgactttccccctgttaactcagaaatgggcttagagcccatatttactcactcacaaagtttggtcctgatgtctcaagtacaaacacaggcaaaggccttgcgggtgtgccaaggcctgctttggaactagacaataaacacctttaagaaatgaagatggcattgaaaagtatgtgaatttgcaacagagacttctacaggtgttttgcttttgtcattgagcagggctctttttcttttcgtattttcataatgtcacgcttgtgacagatgacttttagcgtaggtatttaatgaagccaacttataataacatttcccttatacacgtgtgtgatggatgccacacaatttcttacattaaaacataatcttccagtcttcattccacgggttcagcgttcagtcacctagttgctgggaggagctcagcataggattcctataactgatcaccagcatgctttgatttatatgttgctgtgccagaattcctaaagttttccactccactgtgctatgacggagaagttagaaatgaaagagcccagacacagctatttctcaggaatgcatgcttgaaccaaaagaagccatagcctctgtccgtgattatatttagcaaattaagttgaaagttcatgtcttgaatttgacagaacatgatgagctattgtaggtgatgtgggttttgttttatttttggtctttttcttgtgtatcactgagctttggaagttacaaatcaacatatatttccttcagaatcagtggactgggctgctcaatattcatggattttgagtgagtcaaataaatcaatatgtaaggattgatttttgccttttttgatgctctactcaacaggttaagtgtgttaaatatatttctattaaatatttagttcaaagattaaattttaatacttgaattaaatattaaaatgtattcctctaatatatttgtctttagtatgaagtctcaaaataaaatggaatggtgagcacagaggtttactgtgagcacgttactcacagggtggagaactcactgtgttttgtgattgtcacacctctgatcgttcatgcaaaggcattgttcatgcaaaaagaagggaagatgataccctgatgaccacactgaaagccatacatctggtgttcttatgtaaccatagtagttggacaagcacatctggtcatgttgaatttcacctatatacaagacccaaaatataaggaatgcataaacatatacacacttcatatatttatgtatttgtacacgcgagcgcgcacacacacactcttgctggggagataggctcagcaaataaaggcacttactaccaagcctgagggcctgaatggtctccctaggacccacatggtagcaggagagaactgacttcaatagttgtcctctgcatacacgctgtcgtgtgtgctaacaaacacacataaacactcacacaataaacaaatttaactaaagaataaaaaagcctatagtgaatggggtttttaatgtaatgaagaattggaccttgtcagaaattttcttttctgtgactcatacagagcaatcagagtgcccacctgcaaagaaggctccaatggcctctaaaattaaggaaaagaaaggtttgcagttagccctctctgtatgtgcggtgtaaaagagaaatgctggcagaggggaagggcttatttgtctatctggttcattttaacctcacagcttagtgttttggttttcagtgttctcggagagccgagctgcgttttcacctagcactccagcatgttcctggaacaaagagagccagcaaatgattttctcctttgatgaataaaagacagtttaatgaaaaagtatttcattataacagcacttataataaatatctttccatcctgtgcaaacagcaatagcttcaacctggaaagtaaggaatgccttgtatttggctctactttgcagtgaatcacgaaaccagaacttaaaaaacgagctggataaaatgcttaagtacttttttcttcctggttttccatttgctgtagttgaaaattttgtataatcatgtgccagaagttgctccctttcaacgtaatggtcatgattattcacaaaatacaaaagacctatctcaaattaacagtctctcataaaataataaatatctgcaaagaaaacatgtaactcattgagaaaaacctaaacaaatatagtatttgaaatgatccaatgttgggtaacatagaaatatacggatccaaggcaggattcatttcagttttcttaaagcaaccttttccagtgggtgagttagtttcttatacagatcttgaggcaagctaagattctcccaccttatggatgcgataggactatgagtcaaatattgaaagtgataaatgagttcttctattcataacacagattgcattcttctttttaagtgctcttgggacttgtagaatttaattggatcattttcatcatagtgaaataagtataggattgaatccgagacagtggctgtcctcagggctgcatgtacttatagctcatctataacatagatggataatgtctgttgtacattctctgtgtcctctatctatagatgggaggggtttttctagttagtcctggaattcagatgcttagagaaaaccacagagttgccaagcataactgcagattctctgctacacagccatgccaggcctctccatctatagagatggggtgaaacttcatatgtatgaactcttagaaaactgttggatgatcatcctgatagaccactgatgttgatatattactgatattgatgttattgatatattttatttttacaagtttaaattttaactcctacataactcattaagtaccttcaatttatttcctctatacccccagcaacactttgagtgtttgccaattatttgaaatgtaaacacaagattaacaaatatagaatatatatctgcttaatgagctataatcttttaaatcattactctaggtaaaataaatcagaagaattgtatgcttgtcatttgaaaaatacatattctttgttgaacatactcatgtatttttacatggtgaaagaagcctgagctgcttagattagctctggcttttgggaaaaaaacaaaaaacaaaaaactatctgagctgaagagatggcttggtagttaaagttgctgggtattcttacagtagacccaggttcggttcccaacactcataaaggcagctgaaaattgcctgtaactccagcttcatgggctctgctgccctcttctgacctccataggcccctgcatgcacgttgtgcatagatataaatgcaggtacacacacacacacacacacacacacacacacacacaaataaataaataaataaacacatagttaaagggaaaagcaactgttaatatatgttatttcctattttcttttatgcttgctatgatctcttcatacatttcctccagatgtcccctctcccccaccatctcattgtgtttgtctggctctgctcagggattaagagttctatattgtgtatctgttagtgtatgctgacagtgaattttctggctttgattattgacttttaaaaaacattttctcctctcatgttgcaagttattttaattgggcagaatgtcctggtctggaaactcatttcctttccatgcatttatggatttcaactcatacttagttcaatcatttctgttgagaagtcagctataattttgaattatttattttttagttgttttaatcttttatttagttgttgtaaatgttctctgttaatattttgcttagttttttgtttgtctgtctgttttttattcttaattttatttatttatttatttatttacttacttacttacttacttacttacttacttacttacttacttattgagacaggtccttcctgtatacctctggctgtttaggaacttactggtagaccagggtaacctcaaactcacaagagtctgcctgtctctgcctctcaagttctgggattaaaggcttggcccatcttgcccaactcaattttatttatcttttaagattttacatgtctgggtgctttctacacgtatgtttgtgcaccacatgcatgtagtgttccagaggccagaaaggggcagcaaatgctcctggaactggagttacagatggctgtgagcaatgcatcatgtgggtgctggaattgaacccaggtccttgcaaaccagctgatgtttgccattgcagagcagtctccccagcctctagcattgtatttcctttagctataaaacgatacactctgaatttctcctgcttaactcttagaacacttcagggtgtgatttgatatatttcaatgtttttttgaaaactcagggctattgtttcttcatatacagttttgtatcatcatctatttctccattaaagtcacaaaatgcatatgtctagatctttataccccacagcatgttattaatatccttcagctctccttttaatacatttctaacagttatggtctttgtgtctttatctgggcatttttatcattctgttttcccaaatgacatcccccccacactctgtgatgccttctgttcaactgctttcttgggtactttattactgctactcttatttttgcagccttcttaaattttgccttatgacttatgactagtcttgaatcttatgtgccttttaaaatgaatattgataactccagcaacaaagttatttgtaggtttatggtcatggagtgtttcttttttattttaagataaaatggatatggtaggaggctggagagatgattcaatgcttaatagcacttgctgctctggtagaggacttgggttcagttcccagaatgcatatggagactcacaatcatctgtaattctagttccagggcatccagtgacttcttttggcctctgtgagcactggaatgcacatggtatacagacatactggctggctagttttatgtcaacttgatacaaactacagtcattttgaaaggggggaacctcggctgagggaacccactagcctagcatgtgggcaagcctatggtatgttttcttgattgccgatagatgtaagaggtctagttcagtgtagctggtgccacccctaggctggtggtcctaagtgttacaaaaaactagattgagcaagccatgggaacaagccaatacgtggtattcctctatggcttctgcctcagttcctgccttgaggtcctgtcctgacttccctggatgatggactatgagtcttaagatgaaacaaaccctttctttcccaagttgcttttggtcatggtgtttcatctcagcattagaaacaataacttaagacaataggtatcagaaaaattgtgaagctttgtcactgtcctttattgaggactgttcatcttctataatggaccttctgtgagagcgagtcattttagcccaggaatttgggtgatgagaggcttgtgtttggactttacagtcctggtttaactcgattctctagaactcaggttttctgagaatttggcgatagtttaatgaagtcagttcttcagtgcaggtttgtataagtcacgctctcttagcatagcaaatgcaggcaataaatgcagaaagaagagttatttcaggccacggttttagtggttccagtccattgattgtcctggtgtttgggcctgtgtcagagcactgtagcagaatcaggtggcagtgtcaactgcttagctcatgtcccagaagagaaacaggaagagacccacagagcattgccccaattacttcaggggacctcattaggtgtcatctcttaaagattttattcccaaccaataatgccctgggatgaggaccaaacttttaacacttaggcccttagaagagaatagaatgataaatttggtgtcctcatcataaaatcaatcaaaaactaagtttttgcagttttcttttctttactgaaaatcctcaatttttttgatgtttttttttttttttgtttgtttgtttgtttggttggttggttggttggttggttggttggtttttttcgagacagggtttctctgtatagctctggctgtcctggaactcactttgtagaccagactggcctccaactcagaaatccacctgcttctgcctcccaagtgctgggattaaaggcgtgcatcaccactgcctggcaaagctttaaattttaaataagtattttaagcaaaaacccacagagcgtaacactcactcactatttcttcagtgtcttaccaggacacagagggcttctgtagatggcccttccctttgtcaggttttccttcaactaagatgttggaccttcagaacccagtaaatcagaaactgtgttttcagttatgttgtttttcctaaatgatttcagaaggaatgattccatcaccacagcacagtcaaaagtgtgggttttttatccacaaaatttgatagttatttcaaaattttaagctaagatgtctacaagaaaaaaatattcatatgataaaataataattcataattcaacccatagagatgactacagcgacaacatagattcttttagggtcattaatctgccatttatttttgtaattaccaccaaaagtaatgccctgtttaaaatcaccagctctttaacactgagaacttaaaaacccttggaacctactttgcattgaataagttccatgtgataggttcacctatcacaaataagttctaagttctaagtgatagctctcttgtggaaagcaggcacaccactaactgcacagaaagtagaagcaatataaaagcagtggtgctttgatccctgtcactgagctgaggtgtaggggcctgagtaaacttcttttgaaataaatacaaaaacaatggagaagtgctagagtcactcttctttgtggtaagttggttaaggcttgatgcaatgtattttctgaaagagtttccacagatagagcaaacattatattgaatgctaattaaaagagtctttacaaacctgcctatcagccatttaccctgcttctatcaacaatgtgattattaagacatttgattaatatgtgtactacatatattcaatgtgacctgaatgaatcagatcctgtttacattgtgtgcaatgtggattgtcattgacatgtttgttcattgactacaagatgggggaaaaaatcagaaaatgattttactggctggctgctcttagtatctgtggaaagaatgatgaatgaaaggaaggagttgtgtgataaaatcgaaaggctccagacacaagtaaacgatctaaaagttgctaagtgtgtccttgaggagactcttctctcttgtagcaatagagctcaagttgcagaaaatcaaacagaaactctcattgtaaggttggctgaactacagcgaaaattcaagtctcagcctcagagtgtgtcgacagttaaagtaagggctctaattggcaaagaatgggatcctacaacatgggacggggatgtgtggaaagaccatgttgaagctgagaattttgaatcttcagattctcaagggtttgccctacctgaggaagtagtaccctcagccccaccccatgatccttctaatgtagtatatgtcaaactccataaaactctagatggtctttccagaagacaatgtagaattacagattagactcttggctggttggtcatgtctacaatgttatcttcagatgcaggtttctttccagagggatatcctggctatcacttctgaactcatctgagctgtgtgtagccattacttattgacctggacctgcagagagagtgactggagatgagaagaagataggaaagtttgggatcaggaagtcctgctcaagctgactgttaacacaaacaagattattaagagctatagtatcttatatgcagtttgcaggggaaaataggacagagtcagcaaaaagctatactatgatgggatgaagttagaactgagctagtcaaacaatgccagaaaaacacaggatatctcaagtgcctcgaagatcaaccatacagcggccttagaactgataaccccagtctcttctgctgtaggaggagtcaggttcccatgagctgaaactttacctccttcgaagccctacccccaaacctcagacaggaccttgccaagtctgctcctgggcaggaacataaaactagccttctcacggcctttgaaggaacctgggctcagcctggtctcctatagattactgtacagtagcagtcattccacggtgtgagaaaaccatagtttccatatccgttaggatagcaacacgggcaagatggaagccacattaacacataatctcactttactcccaagcttctctcctgttagcatcccgagtctccatggctaaatgcacatcgtccgcagactttacatgtttcatctaggttctggcaatgatctgtggtgacatcttagccgtcttcctggtatatttgggggaagacaagcacacttccctagcagtggtggagtaccttttaggagctagccttcgtcatgcaccaaattagcagacaccttcatccctgtcttcagagcttcccagcctccattacgtacagataagaaacccaaggaacatgtttctgttacttactgcctgctttgtgtgagaccaatcatcaaatcgtcctcacctttcattttcagattttaaacttgattcatatgaagtttgcttcctggtttaaattttgccagggcaccatgcttaacagtgaaaaaatcactccttcatgttttataggttgttggtgatcatcacatgaaggaaataaaatatatgaaatcttttggggcttgattccctccctccacacagtgcctctgagagtcatttcagggcagtatgggtatcaaaggttagtgcctattttatattcaacatggatggaccagcttatatctaaccactcacccactggaggatattggcttacctccaggtatttttttttttcctgtcaccaataaagttggtataaccatctgtgtgtaggatagcttcatttacctgggctacctgcccagtgtgtaaatgttgactcatcctgtttatgtctttaataaagagctgtttctcagagtgtctctcctctgggagactcccaccagccatgcccaaaggatctggaacattcactccttaccagaaaccttgggtcttttaaattatttttcatttcaaacattctattagcgatccttcagtgtggtgttaatttgcatttcgccaatgtttagtggtcttaaacacgtttctatattccccctttttgtatggattccattttcagttcagggtctccttttgtcttctgtttattctctgagttcttcacatatcccatggactgaatggttgccagacaatggctggcaaatattttcgattatgtagattgtcattttcatattaattctaggaaatgttttagttttggtgaaatccagcttaccggtttttccacccataccacccatgtgatttcctatcccccctcatttttggcagtgctttggattgaacttaaatccctcagttcactaggtgagacaagcaccttaccactgagctatatttactcctggtgacataatagtacttgtcataaaagaatatacatacacacttcattttacaatatttttattatactatatatatgcacacacctatattcttctagtatcaagttatatatatatatatatatatacatatgtatatatatatatatatacatatgtatgtatgtatatacatatgtatatatatgtatatatatatgtgtatatatatatgtatatatatatgtgtatatatatatgtatatatatatacacatatatatcaggtacctgacagtaatgatgaagaaccaggatttaataattaatggatttcctctagaagcagcctgcattttattcaattttttatcatcctggtgtttctactgacataccccatcgacagagttgcaaaagaaaacataaacatcaaaacacaggaaggtgatttttattttctggctgcagaaattctgtgtcaggtaaaatgtatgtctaaaaattcatcctttagacctaactaataaaaataccattttcagactcaagtacggctggtttgtagtaagatttcctgagaggatgggagcctgcttggcagaatttgatagttaacaacgtctgggagatgtggtagtgacattgcatacctctgtggttgctcttctcagttaacttgactgaatgtagaggcacctgggttgacacatttctaggtatgtttgtgaggaaaatttccaggcagggttaattgagaaaggaagatccattgagtatagttggtattattccatggactgggattccagaccaaatttaaaggagagagccagtgaccactagctctctgttcattggttctttgagatatggggagtcacagctgtgtgcccattccctgtgatctctgctatgcatcccacagtgatggactgtaccagtgctctcatttggacatcccacagtgatggactgatccactgctctcatttggactctggaagcactccatgtgtgtggtgtacagatatacatgcagacaaaacatccatacacataaactaaaatgaaatattaaatctaaaaattcctgttagggagggacacaagagtatagggaaagattattcagagtacattatatacacctatgaaatgtcatagattaactgaaccccacaccctaaaaacatcctattaagacaaaaacatttcttttaaaaaatagtcctagccctctttctctccctttcagagacttcacttaagtgtgtatctggattattggatgtgtcccttgttcaatattggttttttttattttaaaaattaggtttctctatgctgatttgtgtattttcttttaaatgtacttaatttttaattgtggtgtgtgtgtgtgtgtgtgtgtgtgtgtgtgtgtgtgtgtgtgtgtgtgtactggtgcacatagaggccagaggcattagaccccctgtagctggagttgcaggcagttatgagcctgatgtgggtgatggtcttgagtcccctgtaagtcaggatgtgccctaaatgcagagtgatctctctcactccttgattagcatacattctgttactctgtatttatgtaatcccccactccttgattggcataaattctgctactctgtatttaggtaatcccctactccttgattggcataaattctgttactccctattcaggtattttctttaatcatccccatgccacgaatcccatctggtgtatgttgcttctcacatatgcattttccacccccgggatttccagttcaccctttctgagttcttctgtgattctgcttacctgcccattcatttccactgcctgggatagagatgtaacaattttgatatctctttgttatttctaattcaattagatgataattattgtaaatttcattttgttggacgctccacatttttatgtccttgtaaattgattttgaattttgttctgtgatggagttaaattataaggagcacactagatctcactgcgccatgattttgatttgatggaaccgacacatcacataggctagggccaaccacaggccattaccacaccagaatctttcaacccaagtggatgattatggtttttcactctggcaagaaatgtagatgctaaagttttccccaaacctattttctggtaacagaaaattatataaattgcaaaatgtaagtcaactggttaaaaatgtccacatggaactctggatcttacatcactaggatggtgcttgcaggccgagttctctgtgagggattgagagggaggccagagtgaagtgttgctcagggggcgcctctgatgtctacatgtgaagagagcgaagtcgggaagcagactggcagaaacagttagctgagccttggaactgattgcagtgtaacccaagttcccttgataagtggctccatcgtgttgggaacccatcactgttttgcatggttctatgcagtccaggcaacagctgagggtgctgacagctaaaggccgtctctagccacactcctagaacaagatctgggtgcataacagctcctcaaaccctcagctaacatcatcctgagctcagcatgggtattgctttgttaatgcactctatacctttgggcattgacgactgcaataagcaccaagcttcccactcctaatgattcacacggcatctacctatgtgttttgtgtgtttcagagacacatctgctgatgctttccttcctgttcagtttcactaaagatatttttacagggtcatggtctttcatcactttggcaagtcatttaaatcaaaccctgagactgtaatttggaagcaaagctttgaatgtgttgagcattgtttgcctggcaggtgtgtttcttgatttttttttcttttttcattctgaataaagagaaacccatcaaaggagaacaaaggagacaaatttgagaatacgaaggcctttaccacctgtcaggggcaaaggggtctgggaacagggtgtcaaaagtgtcttttgaaaaaacaagcaaaaaattgaaatcaacaatttgagagcttgagttcattgacactctcttcctaaagtgtttgagctttggaaactttcctcaccttgagctgggcacttttttctccagtaaaacaatcacttactatttcagaaacatagttgacacaaacaaaattgatgcgggctggtggtccctccaaggatgggaggagaaaggctgacatccatccatttccctcttgacatggcagcgcactgagcatgctcaagggaaccaacaccctctgccttagaaccagagccctttccatagtgaaatgctggtggcaggtggcgaacaaggggtttgttaggattcatagtgctgatatttttgcaaagcaaggtattaaagcttatgattatgacttgggtatgatagaggtctgagtccagctcattgttattatttcattgatgttgaaaaatgaatgtggtagtgtgttgtgtgtgtgtgtgtgtgtatgggtgtatttgggtgtttgtgcatgtgtatgtatgtgtgtgtatgtatgtatgtatgtgtgtgtatatttgagtgtgtatgcgtgcatgtacgtgtgtatatgtatatttgagtgtgcatatgtgaatgtatgtgtgtatacatctacatgtgtgtgaatgtgtgtgtatgaacacgtacatgtgtgtgtaagccagaggaggatattatatatcctatctattaccctcaacaccttattcctttgaggcaaattcagtccccgaacttgaagttcgatgtgtgcagctaggttgtcagccatcaaacctagcaatcctcctgcctccagcatactctccacagtgctgaggtgtaggcacaggggactaggtgggtgttggcatacaaactcagatcctcatatttgtgaagcaaatgcttttaaccatggagccatttctgtagtcccaaatgtgagacttttaaacatctgtacttcagggttcaggggttttgttttgtgttttgtgttttgtgttttttgtttgtttgtttgtttgttttgttttttttttgttttgttttgttttgttttttaatctcaagtgttttaatagaagtcaataattcctctgtagatacatctctagttctgagtgtcgttggtggcctggaaggatcttgaagtccaagcagaattactggaccctattagcttgggtgtggggaagaacaagatggcggtttagatcaagaagttttcatcacctgtggagatacagcagtaaacagtagacaggtggtagtgtgtgctgtaagaaagcactctgtggaagccctggaaaataagccagtaagcagcattcctccagggtctcagcttccattcctgcctccaggttcctgtcttgagttcctgcctcagatttgcttatttgattgtggattatgtcctgtaagccaaagaaacccttccctcccaaagttgcttttgctcagtatcttatcacagcagcagagaagcacagtgggtcagtgtcccagaactaatttcctgtgctattcttgaagcagtcctatagttttaatgggtattgttataaatattccttggacaattctctgagactggagtcttaaacctcagcccttttttaaaaaaatggggtattaatcagtcacacccagtgcctcagagcccaagaagctaacagagaaagggcagaacccctaaggcatgtggagaggagagccaggacccttttatacttggtactcaggaagtattctctctcctcagtcctcagattgctttgaggcaagcagtgattaaaattctcctttcactactgatttgaagacagctcacccgaaactaagtgctttgcacatccacacataagtacttcattcacaattttctgtactcactagatggcttactagaaccaaggggaggaacatctgaaatatgctagatgtagaaccattaatatcctccacatgccaatgttgaaggtttggtcccaggttgtggcacagcttgaatgaagcaggacttttaggagggtgggcctcatggggggcaatttaaggtgacttgaagtatgtctttgggatgtatattcagtctcactttccatgtctctgcctctttccatggctgctctaggtgagatggattctctgccctctgccttcatggcctcgtatctctctagacactccagacctgatggtcccatctactatggactgaaatctgtgagatcaagagttaaaacaaacatttcattcctcagacctccccaccacaccccctcccggtattttgtcacagtattgaaacctaacactaattagtgtcatgccgttaccctcagagttaataattactgcttgtttgctgctgtatatatttgagtttttctcttctccttttccattacttttgaggtggggtctcactgagtatccctggctagcttagaacttgctgtgtagatcaggctggccttgaacttacagagacccactttcttctgcctcctgactgcttgggttaaagccctaagctgccttattcagcatatttgactttattaacactgatgaatcgaaacttggaaggacctctggggaatggtaacaaacatcagaacacgcttcttttcctttatctaagatgcagtatttaccttgttttacgttggaagctactatgtggtttatactgaccttgatgtgaccagatgggaatcactccatgtgtaatattctctatgacagcagccgggactttcaaacactgcagagcagagagaacagggatggaatacacaggatcttgatcatcactaccttggttcaagtccagttctatcttaccatttgcatggcttcagggaaacacttggatttaactgtgtgtgtctttgccatttgtggagtgagttacaggacatgatctatgtagagcacttggcagagtgcccagcacatgctgagatctattaagtatttgcattcactcttgtgtttctcatgcactcacccaagaactgatcctgttaggggctagaaagatagctcaatggttcagagcactggttgctcttccacaggtcccaggttcaatgcccaggactcacatagtggctcataaccacctgaaacactggggaaatctaattgctcttccacaggacctgggttcaattcccagaacccatattgtagttcataaacatctgtaactccaagagaatctgatggcaccacatgtgtgtggtgatcagacaattgcaggcaaaacactcacacacataacagaaaaaagaaaaaaggataaaaggactggcctattctaaatgtgttaagtgtgtctaaaacacccaagccatcacacatgtctcggtctggatttacctttttacatagttgtacactgttggcttttagtttttatccttgagagggacactcagttagccagaggatgttgaaatcccacgctcacatcccttggtgtttctggccagggtacctattggcctggagccttagtttgacctgatgccatgcctgagctgtggtccttttggaggctcaactttttctatatgacagtcccgttagctcttccccactactatacagaagtggagttcactggagtcctgttaggtttcttgctactgccccccattaggcataggtttcctcaaagtggttgacatgcctgcttaatctcttaataaggcgtgtcagaattttataaggccagacacctgctgactactcgggtgttcattcgctgattgaataagtggagtcacgattccttctaacagaaggttgaatgtcatctatatactatagcttttaccttttcctgtttggaaactactcatccttatggggaaaagtggtttctctctcatccatactcctgtaaggtgtggttttctcccaaatgtctttatcaagtaaggatgacaagacagaatttctgagaaattctggattctcttttttagaatctatttatcaaaatctgtttatcccctagagtatctcatgaagtctgcttggaatggtcacctccttgtttggaagtctttgatacaagctgtacaaaccattctccaccagccacagtgagtggtgtggtatcttatttatttgtttcagtagattttggtggtataactttttcctgagtctccaagaaggatcaggaaatagtttaaatgagagagccactgctggacagctgcttgattacaacataggtcttggcacttcctcatgcctttttgatttaataccttaaataatgtgtctacttacagaaatgtaggggctttggatttaaggcaattagtttgatttggttaaagtgtaaatggggatttaacagaaaataaaacatgccacttgagtggataatcctgttaagactcagagcatcaaagctcttcggtttaaccataaatggcatcccacatatggataagaaatgttttatatgctgtcttgattatcatcaaagactaaagaagtgaacttggagtccatgtctgagaatcatttgacaacttgtagtcatgggaaatgatcacataaggtcaatgactagagcacaacacatccattaaacttcaaacccaccatctacttagaagcatcacagtagcatgtgaaagctactttatccaagggaatgtaagcctttgcagttttaggaaatactatattacttgtgtacaataaaactttagaagagaatttctaccactgggaatggaatttggttgatggagtgcatgaagccctgggttcagtctccagcatggcagagacaaggtatgctggatatacctgtaatcctagcactttcaggagaagcaggaggactaaaaattcaaggacatcatggactacatagtttaaggccagcctgggatatgtaacaagctgtctaaaatatgtatatttttagaacattctggtttaaaaattacttttgatttcataattgttctttaagttcagtaattcttagggcataaaaataactaccagattgaaaaaatcaagaaaagaaggaacgaattgctttattttattaaattcttttaaatcattaatattttattcttgtttatcatttgaaaatctatacatatatctaatgtgtcttgatcatacctacctctgactctcctcccccaatcttcctccggaccctcccccatcctcctccaaacttcttgccctccattttaatgtatttatttccaaccagctgagccctgttagtgcagcccataaactcaggggtctggtgtgaatttttaggacatggcaaacccatcagtaagcacattaagtggttctcccttccaaagcagccatcaattgctaagagctccccaggcagggatgaggctttgggaggcccttccccatctctgctgaaatcttagctggcttgatattctgagtgtcttgtgaaagtaagagcaactgcaatgagttcatgtgagcaacagacctgtcaggtccaaaggacagcatattacagcatattactccccctattctctggatcatattctgtcaccctcttcctcagtgttccatgatacaggttgaagaggcatttttatagagtggtcccagctacagccgagtacccttagctgcctattctcagcacttggaacagtaatgaatctctgtgctcactgccctccccaataagaaacttctccaaccaaggttcacagcagcacaaatcagtcgatatacacatttctagaaggcaatctgacaacatgaccatttaaaaggtattaacagttatgctataaggcaaatgccttcctttgtcattggttttgaccatgtctaaagtaccaagcagagattctcacttgtggaacaggtctcaaatcctatcaaaagattaattggttaccacagtaaacaatcttcctattattagtgataataatattactgttaatatgatacatcttcccttggcaggttggtatttggccaaggcaagagaagaccatgtcttttgattacctacctagatagcactttccaaccctaggaaagctagccagcgaggagagtgtatgccactccacaggagtagttagctgggtcacatatgatacttctagtttttaatgaaaaccccagactgatttccaataacagcatatgtttctctttttccacatccatgacagcatttgttgtaatttaaagttcctatggtgacctttcttactaggatgtggtcagatcttaacatagttttaatctgcattttcctgatggctaaggatgttgattctctaccaaccttttatacttcttttgggaactttcttttctgtttcatgtcccagtttttattcattcattcattctctctctctctctctctctctctctctctctctctctctctctctctcctcccttcctttctccctcccctgcctctgtgcccaagtgtgtacttccagatgtaaatcctttgtcagatgtatagttggcaaggatgttttgcattccacaggctgcatcctcactacattgatggtgcccattgctgtatagaaacttttagtttcacgaggtcctgtttgtggattgttgatctgatttcctgaacaccaaggtctcatccagcaagttcttatctgggcctataagttcaaatttatcccctaattcccctcccccccagaagtttcagggtatcaggccttaggttgatgtcttccttgatccatttggaattcagtttgttgtaaggtgggagataaggagcggctttaatttttctacatgtttaaatccagttctcctggcaccatttgttaaagatactatcttttatctaatgtatctttctggtgccttggtcaaagatcagagagatgcaattgaatgaaatatatccggttctctatgttctgtttaattaatctacatgctgtttttattactgtcactctatggtagaatggtaatttaagtatattaatattttttgcagtgtttttttcaaattaatttgattgccttggacttgtgtgtttcatcttaatttttgggttctttttttctatgtctgtgaagaaaggttctggtactttgattgggattgcattgattctttttactgctttacactattgatatttctgatccacgagcatgcaagttctatctatggtgtcttccttagtttcttttttccacattgtatagggctatagtaaatggaattgtttcctctgacttctttttcagtctgtttatcattgccatataagacgactaatgtttgtgtatattattttgtatatagactttgctgaaagtattttttggctttaagagatttttttgttgttggttttttgtttttgtttttgtttgtgtggagtctttagtgtctcttagatgtaaaatgatatcatctacaaaacctttgacttcttttcctatttctatttcctgtttttgctttggctaagacttcgagaagtatgttgagtaggattggatagagtggacacacctgactcattcccactcttaataggaaggcttcatgaaattgtcctcatctaacatgatgctagctgtaggtttgtcacatgtagcaatgtagccatgactttactatgttgggttatgttcctccatcctttgcctgtccaagtattttagtcaaaaattattatttttacatattaatgatattgtcatgtaatttgcatatttgagttagtttaggtgatggataatatttactgatttatttatattgaaccatccctaaatctctagattgaagacaatttggccacgatgaatggcctttttgatatgatcttgaatttgatttgtctgcattttgtttttgcacatttattcattggggagttcaatgtgtaatttctttttttctgttgagtctttatctgaattgggagtcagagtaatgctggcttcataaaaataactcgaagccttttcaatttttttagaataacttagatagcattagtgtgagttctttgatgctttggtataattcttcagtgaatataacaccctgggctttttcaggctgtgtaacatttagtataactgcaatctcattgatggtttttgatctgtttaagttattaatttatcagccgggcgtggtggcacacacctttaatcccagcacttgggaggcagaggcaggcggatttctgagttcgaggccagcctggtctacatagtgagttccaggacagccagggctacacagagaaaccctgtctcgaaaaaacaaaaaaagttattaatttatctaggattaattttggtgtattttaggcatctagaaattaatttctataaaatttcccaggttagtcaaatagaagttttaaaaatgtattcttaaattgttttgtggtcatctctaccttttcatttctacttttattagtttgagtattttttctttcttctgattaatttaggtaaaagtttgtcaatcatcttttcaaagatcctagtcttgagttcacagattcttggaatttttaaatttctgactcattggttccagtgctgattctgattatgtctttcaatctctcataatttctgatgtaggtacttatgctgtaagctttcttgttcagaacaccttcattgtgccacattggtttgtgcctgctgactgaattttcctacaattctaggagtgttcaatctcctccttgatttcttcttttgtccagttacccctcagcagggtgttgtttagcctccaggagttgttgcactctctgtggttcctattgctgttgacaacttggaaaaatttatttctacttcaattttaatagatagttttgctgagtatcatagtgtgaatggacaattatgctgtttcatagcttggtggatatcattcaggcatttctaatttttcgttaatgtgttatgctttctttaatgctttagatgtttcagtaggaaaaccagctgtaattctgataggctttcctttgaagtgagctatttctttttcctcatcttttgctgtatccctctgttttgttggaaagaatgcataattgcaatgaatttgtctggcttgtagctgttaataccacgaaaaccaagtcaaagtcaaaatataatctcaatacacgtgtgctactaaatatgaagcatattagagcttcatttaacaagcagacttttgtggctaaacagtgtttattttcacttaaatttattgtattcttatcataatatttaaatatgaaaacaaatgtcacttattactcacagatgagttatcactattaattattaatgtagttacagcattcttaatatagggttttctgttgcatggatgcatttaaaatttgttccacaattaccgtttatcatggtagagctgttttccagagacagtaaatatatattacatcattttaatatctgaaggtattttttaatatttatctttatgtttaattgtgtgcatgaacatgtgtcttcaggtatgtgcacatgagccctggtgcctttgtaaatgggcatcagttctcttgaggactggtagttatgagccatcaaatgccggtgctcagaatttaacctgggtcccctgcaagaacaatacacactctttaacaactgagtatctctccagaccccatttgaagacatttaattaaatccgtattcaatatatggtttgactagctgatgattttgtacttttgagtgtctgtttcttccaacagtgaataatattcacatatattttagtgcatctactgcctgccttgtaaaatgtaactcttaagcagatttgtggaagaaaagtactctttgtaaacaactcgaacctttcaaaggaccaatacacatatttctaattcctttttagtgtcaagccccaccagaggcttatgaggagtgtgtcttctatattctttctggcactcggtgttcctttgtctataatccgagcatacttcatgtgcactgtattttatcttattggtaaacttctcagatgtgggagatcagtgaagccaaaagacttttgaaataatatttgctatttgcattaccttttctccaagagaactattaagtttgctatttgaatgttggtgatttttttaaattttctattgagtaaaattgtctgtcaaatgcactttaaatcattccttatttttaaaatttaactttgcacattctattgtaatatagtactaagaattttttaatgatatgtgtggctgtcatgagtttctcataatcatttttctcatgctgttctgtaggacagagttatagccatgaaaacacacacacatatgagagagagagagagagggagggagagagagagagagagagagagagagagagagagagagagagagagagagagagagatcagttcttgtctacagaactgagtgtggtgatccactttggatatattgtgtcatcaaataagtcattcctgggagaggttattttatgtttcttcgactgatcgtgtacttacagaatgtgcagctgcctgctctcagaatgctttcttgaagttatctgtgctttgtaactataagtaaggaggtgtttaaggacaaacaagtcactagcaagtagacactcattaggctatgaaccattttctagagcactaaaattattatgaaaagtaagtgattagacatgttttgttttaaaactatacagatacagtcctgaaactttttgtattctacgaaatgaaaactcagaggattaaagtattcatacttagagcactgatagaacatcaataaactcataaagcagaagcaggcaattgcatttctgtgactgttgtactgaggtctgggagtttgcattctgcacttagggggccatgtttcaacattcctccatcttgagactgtctacagcttttgatgaagtttggaataagttctaccatcctcccatgcctcaggccactgtctagtttcagtctcatctgttccttgtccatatcttagaatttcttatgtcccttctgccccagtttcctctctagcatgtcttcagtgtaatggttgtctatggtttgtttccatggcttatgtttgttatgccttcttcacataggctaccccatctgtgtcacttaacatagctctctgactctgtctttctgtcatagttttctatttctttttttcatttttcttccttccttccttcctttctttttctttttctttttctttttctttttctttttctttttctttttctttttctttttctttttctttttctttttctctttctttttctttttttggtttttcgagacagggtttctctttatagccctggctgtcctggaactcactttgtagaccaggctggcctccaactcagaaatcggcctgcctctgcctccctctttcttccttccttcctttctttctttctttcttttttttttttttgttttgtttttgttttgttttttgggggttttttttttttttttttttttttttttttttttttttttttttttttgagacagggtttctcgaaatcctggctgccctagaactcactctgtagaccaggctggcctcgaactcagaaatatgcctgcctgtgcctcccaagtgctgggattaaaggcatgcgccaccaccacctggccatagttttgtatttcatctcaccattttttttttcgctaaaactcatgccaaaatttataatggctgtgcttagcgtttctgtgagctcctcccaagagccataaaccctgggaatgtaagtctgctcttgttcactgtggattgtcattgtctagtatacaaatttttagatatagtcaatatttaactcttaacaaatatttattgaacattacatgtaagttcttttcttttttaattctaatttttttcatacatgaggactacattgatgtcatttacatgtcccttccactcctcctgtgtcctcctactctcttccaaattgatgaccctcttctagttacacacacacacacacacacacacagagtccattgagcccatttagagttgcttgtatgcattgagggctgaccacttgggtctggatagcctattaagctctcgttcttagagaaggttgattctccctgcctcagaaaccatggattgtctgaagctcttcatctaggggtgggctcttgtgagatttttcccaatccatgttggcatattgaatgctattgtcactgtgcagctcttgaggagttgaccatgttgttgcaattttgtggatgcagcttccctgacatacatagaagatgcaatctcacaccagacattgtcttcttaacattatgacagtgtctggcatcaaaagtatcctgactgtttaaatcataggaaattattttaccttcccctgaagtgaactccattctgtggtcttcaagcaaaagagttgaccaacctccatatgcatgagaataattttatctttccatattttaatggttttaataaaatggaaaattgcatttaaaaagaaccagtttttccctcttcatttttttttgtagaaaatcaaattacagctttgcttccaaaagttgctgttaaggtttcagacatcaacctgaatgttcagccgtttcatgcctgggattccacagaacattgacatctaatctccaaacaaagcaaaactgctaattagaactcagggaagtaagggagagcaggacttgaaaatttataataaccaaggagttgtcagagcaaaatatgtacaacagttcttgcctgtgtgcagacagtgtaagcagaacttgcaaggtactgggggcagtgcccttagttagggtttgtattattgtgataaaacactaatccaaagcaacttggggaagaaaggattgatttggcttattttgtattatgaatcatggttaattgaaggaagccaaggcaggaacctggaggcaggaacagaggcagaggctgtggaggaacattgcatgctcttcagggcttgctcagtctgctttctttaacaaccccggaccacctttccaggggcggcaccatccacaatgatctgggctctcccacatcaatcattaagaaatgcgctacatgccagttttttgttttgttttgttttgtttttttgttttttgttttttgtgttttgttttttgttttttgttttagtttttttgagacagggtttctctgtataggcctggctgtcctggagctcactttgtagaccaggctggcctcgaactcagaaatctgcctgcctctgcctcccaagtgctgggattaaaggcgtgcacctccacgcctgggtctacatgccagttttatggaggtgttttttcaactgtgtttcttcttctcagaactccaatttgtgtcaaattgattaaaaacaaaacaaaaatctaccagtgattgggattgtgaaatttgtaacataatgatctagggttgagaatttaacaagatgaaaatattgaaaaaaaccaaaagccaatagttatttagcatggggagttgtttgcataggtaaggagaattctatctcagatacacagatattcaagaatgtatttccatgagcaataaaacactgatatcatttattattttatagtcttcatttcctgggcagtgtttctctgcacaaagagatgactagtatgaacatacctattcctgatcaagcaggttgctgtaggtcttacagagacctggctccccttttaactgttctgtctacaggaagttgtccttatgtaccctgtgtgtagattcttgcccacttaggtcttatctgaacatggctgacttctgtaataactatgaacgtgttggtccactatccatcacttcaatcatcccttctgcatccccttctgtaatcatgtcacttggtttctaatctcacttcctgttaacttccatctattatcagaagataagacttccagccttcctaaactcggtcactgctttgcttgagtcttttctctccatggcagaattaatcattccttaataatttattattctcaaagttttcctcctatcttcttgtatttttcttttttagagatgaactcacacatcctagtttcctgttatttagtgcattagttctacttttgaatataatagtcacattattttctaatgtattttacctttcttcttctgtcccctattcctctccaaggaccaacaagtgaagaatatcttactccctaaacagccaaatgtgttaggccatggagatgagaggcatcttctagagttaggaattacatgcatcttaatttatgcaccacaattatacttctgaaggtaactagcaagagcttgagagaaaaacatgtggagaagaacaatacatttagaaaagaagtatgtcatgcagactgcttcctagtcgctgacagacagggctaaaccaactctaggcaaatggttaaagtcatttgaccacttaattgcattttactatttaaaattgcagagatatagctttaaagacatacagggcagttctctgagtcagtaaatgtaggaccccgatgcaaagctatgcatggcaatctctacgcccattttagacaaacctacatttcaggaatctacaaggtttgtgaggcacacattcaaagaaagggtcacactgccatgctttaagagggaaaggatgaggattctcagaggctgaggttaatgttttctaacttggcaggcattgcaacaggctcaaagggaagaacgatagtcatgtagggaaaagacgcatgcaggggtcacggtggccgagtaatttggcattcttgtcagggcaaaaacagggtttgctatgggcagtcttcaaaactgggtcgaggggaggccttaataaatgaggggttttctgttagtgaaattggccttccagggattatcagtggcatagtgaaataaccaggcaggcatcttatagatggagcacgcccatactactatgggcatcagtgacattattagaaaggtccatctaaaaggtaggagtcaaggagataaactaatgaagtacgctgatgttacagagagggatgctactgagaggaaatgtggctgcttacgttcatttatgagcagatggctacatatggttgactactggctacccactgcgcaacccagacccagaaattagtggatattatcgtgtgtgtgtgtgtgtgtgtgtgtgtgtgtgtgtgcacgtgctttatagtgtattttatagcataagtttgcatttcatgggaatttttaaatgaatagaacaggacaaaagtaagggtaccaatagagtgaaggatagtggtggccatgtcaacatttgaacattatctaagcagacaagggccccgtggagagagtcatgttgatggtgaagaagatggagcattagagacacatgctccagaagccagggcagcagagaaaagtgaccataaggacttaggaacaaaaatgggtgaaaacagcgggatttactgctggagcaagatgaaagagaacttctttgcatcttgaggggaaaaggacgttgacggatatgtttttaactctcggggtggaatctagcctttgtttcatctatttctgattagggacgtatccctaagactgtggaggcaaaaaggcagctaagtaactataacgtctccactgcatttctccgtgcgtggaataaaactgcattcaacgtttggcttcaagtttggtccctattacatcctaagagtcttcaagtttaaaaataagtataatctttatttctctctttaaaatcctcagatgtcataatattttagttagtaaagtgtatttttttattgctgatgctatttcataacaaattcttaagtatgtgaagtagcctcccatgcctgtgggctcaaggctggcttttccttgaagcacaggatcacacatgtaaacatacatgtcagtggtggatattcatgttgccctttgcaatacttactggaaatgaagatatctattaatttcctaagtcttatttgtaattcaccttcactgataattctacagcagagcaaagcagatcctccagggaacgtgagttcagaaccaggaatatctagagtacactgcttacctatggttgtaaatgtttttcatgttgacgtcaaaccacaactctatcttcttcttaactcccgcaacatacttaagaaaaatgaatgtcaaagctcatatggcaagatttaagtttttaactattagtcttcatctgctaattctttgaaacctggtgtgatgagttgtttcatttataaagggccagaaagaaaagaagaaaggaagggagggaaggagggagagagggagggagggaggttgagagagagagagagacagagagagagagagagagagagacagacagacagacagacagacagagaggagggggagggagggaggaaggggaggagaggggaggggaggggaggggaggggagggagggaggaaggaaggaaggaaggaaggaaggaaggaaggaaggaaggaaggaaggaagatagatctcgaatttctgtactcttggtggaaagaatgtccttttgctcctaaaaccttattttggagatgtgattctgtaccaggcttttattcgatgtttttggttaaggtattttctgctctcaatgctctgttcttttactgacttcccaacattgagtggcaggtctgcagttgctgataagtgtgtctgcctaggagccgcatcagccttatctgctccttcccctgctcctgcgtctacacactgcacctcaagtaacaacaaggccaggtttccgggctgcaaacttactcaatctccttcttcttaaaggcattagctgcagagctagcagagctatgctccacttctgtgggtcaatatcccactttaaatatttgaactttatcgaatctatataaattttaattttatttcaagcatgctcagcaccttttcatggatgtcatctctctttttaaatccaagagcttgaaagatggaagacttttctaagccttctgtttgattcatatcttctcacctgttctttgttctgggttgatttcctcctcctatggatatacaaacagattttcttacgtatccaacatcacttcatctctgaaatacagtatcattcaagatagtatcacgttaaaatacaccagaatgtgttctgtttatgggagttaactggatccagtgaaataaattttaattaaacaattttttcttcttctgcccttctctcccagtttactaacacctaatgttctctccattggcatcttatttatattttgtaaatgagaagtaaatgtagaccctgattctttatctgatggcattgttagtattattattaagaaaaataaatggaaattattttctatttttttgaccaattcccaatccagatgaattattgtttctacaaaatttttatataattcatgtttatataatttatgtgtatctttgttttacctatgactactttctcagccaaaatatacgatttggtaagaaacatcaagcccaagaacataaagaaaatgtatgttttcttaagtattgtatataaggacaaaatgagatagcagaagtttatatactataaaaatagaaccgaaatgctaagtgtcaccagtaggaaacattcatgctgtaatctatgcagaattagtatgtgaggtctgcggcatctatcccaggtgttttggatgctaacttcaagccctgcagaaatttcttacctcctccttaaaagacaatattttaatagtaacttatgttcatagttacttatagtaacttgtagtaatagtgcttaaatggggattcaagctcagatccttaaaagatagtagtatcatcagaactttgatttgtcaatgttttcattatactcaaagaatattaaagcgtccttgcccttacgtaacagaaatgattcttctcttccaaaatgagtaaaaaaaaaatcctcagaataattaaattatactccgactttacttaactagtttgtgtgtttaatattaatagatgtgacatactcaagtctaactaacctatgaaggcacctgaagaaaatgtcatttacaacacactgaagagctgcagattatgaaataatggtcttaattattaattcacatacctagacattggagaattcatgatgaataatctggaggccaaaggttgaaacttaattatatgatcactgaactcaccaatagaaagacgctttaactaaacaaattagtttctcaagttgaaagctattaaacatggtcatatttgggagtggagagatggatcagcagttaaaagtgcttcctactcttccagaggacctgaattcagttcccaggacccatagggtgtatgtgtgtaacacacaaacactcataaccacacacagacatgcacatatacaaaaaattaaaaactaaaatataaatcttttaaaatatggtcacatttgttagtgcaaagtctgtttaatctacagttaaagcactctacatatccggctcacttactcagacatccattgggcttacaaacaccaattaataggaatatgcaagtggtttataggacccatttattttagttttagacactatagacatagaccctcatgtttccagtgaatagttgaagtaatagatatgagatgcagaagccttcagtacagaatttatatgtaaaatataatttttcctgagactttagcacactagattttttttttttttttttttttttttttttttgctgaaacagtactgcttccagtagcttatttcatgtgcgattattttgttttctcagcttcaggcaatctttactgtgacttccaaataaaaataaattttcaaaggaaacattccctacattgtagggtagtcatctcatgaagctggaggaactgtaaatacattttcatagtgcattgtttctgttttgtttttttttctaggttgatttgcatagtctcatgataattaatatcatcagtatacattatttctccctcactgaactcacaaacagaaaaaaattacattcattaaactcaatatgttatttcattgacagtagttccattaattcacactaacttcaatgtgaatacttgttaatgttaaggacagactacatacaaatgagaagtttttttctaccatgataggactctacaactgtcacatcagcttcatgatcagcaaatcttacagtgaatggtgtgtttgaactttcctgatgggaccgtaaacacatcacttctaatttttaatatgctttgcatatgtgtgtgtggatacatacataaatatgcgtatacatgcatatatatgtatattcatatgtgtgtataaatatgtatatctgaaaataatttctcaaagactccagctgaattctcagctaaatgttactttaaaattttaagatatttttctactgttagattggatgttgttgggcttgcagagatagatggctcagtggttaatagcattgacttctcttacaaagaccctgagttcagctcccagaacccacatgatacctcataacagtaactctagttccagagaattgcgtgctctcttctgacctctgtgagcacctgcgtgtgtatgttgtacataaactgtcacaggtgcgcacatacatgcaaataattaaatattttttaaaaagaaattttaagttctgttttctaggcagctgagtagatatctatttttgttacctaagaaaagcatcttttactcatcaatagagacaccattgttgtcgataatgattgtgtgtttgatagcatgcatgatgcctgacttaattggcatgcaagtgctcacactctgctttctctgtatgcttctagagatgatgatggactagcatggcctgaagcatggctcagttctattacaaaagaaatgtcaacgccccctacagagaccgcatcccactgaggattgtcagagcagaatctgagctctcaccatcagagaaagcctacttgaatgctgtggagaagggggactatgcaagcgtcaagaagtctctggaggaagctgagatttattttaaaatcaacattaactgcatcgaccccctgggaaggaccgccctcctcattgccattgaaaatgagaatctggagcttattgaactattgttgagtttcaatgtctatgtaggcgatgcgctgcttcacgccatcagaaaagaggtggttggagccgtggagctactgctgaaccacaaaaagccaagtggagagaagcaggtgggtgtgagtgtggtgttttcagtttattttgcccataggaagtttctttagatttgtaaacaccgtgtgtgtgtgtgtgtgtgtgtgtgtgtgtgtgtgtgtgtgtgtgtaagtgactgctagaaagaagctcaaattttcccttagcaggactgcaacatatttaccaatggcagacatgtggtggcacttgattactatgaaaagaaaatagatgtaagttcagtgccgtgtgtcttgctttctctctgcttgtttacctccatagaaatagagcgactgttgttggaaacaagcaaggaatcttttcatctgcctgaatcttttgctttgacactgcccttccctctgttggatcccgttgcccagacattaaccactctactttcttgcattaaagttaatggtgggttaatggcaaagccattgcagatgctatactgtggctccaaaatccatctttcaaaatgcaatcatggaaggtgtgtccattgcacttctagaaacttctgcctgcttgataatagatagttttctgtgtctgaaaatgatggcgcatgagtaatcacatatccaaactgtgctatggctactccactgcctttgattcttttaccaagctcttcagagttagtagattgaacactgtggctgagcatctcttccagttctgagatgctgtagctgatggttctttctcaaatcttaccctcattcacttcttcttccctgaaccaaaactttgataaactaacactttaaagaaatcatatttctctgcttattgcttggccagctttgttttgcttcagatacagttgtggactaccttcttacattgttcaacttggtaggatcaagtttacattgaccattgggaacttgaacaaacctagattggggcataaaattatagtaacacctaaagatacttaactgaccccagtgttacaccactaagatgcttcaggtgcccagatggagaaagtaggagtctggactaatggatacaagctgaggtcctgctctcttagtggttgagttacatcactgtgatacagccttgaaaagtgactagcttaggggaataaagatagattctcacagttcaaagattatagcctatggttgtccaactgggcactgcctacaagagtttccgtcattttcctgtagcccacaaatctaggaatccagtactaaaataatgcattcatgtgatgaaagcctcaatcaggtcccaaaagattgacctttgaacactgataccctggggccaaagcttcagtacaagagcttctagagaacattgaagacccaagatgctacccttagacacctttgggctttacatttgtgcctgtaatcatagtcccaaagcatctacatgttctgctagcaacacactatattgtatagtcccttgtagttttgcttatgtagccatagttcaggtgccaagtcttccatgtagaccactatagacggccagaagcctgtaggacaaaattggcatttgatgtatttttttcatgtgtcacttaagagactcatcggtttgctttctagagagttctttaatgtctctttagacactgtcatttgtgcaaactggagaaatctggtgtctggagaaggtaccttctatgataagagtgtttgttgaaaaatgttcaacttctgagctaagtcctcatctcccaagtaggtcctggctcctttcaggcacttggaccctgattattaatagaaagtagtaaaggtttgcagtctgccaagactctgaagcttcgcaggccatgtgcttctggaagatgtctctcacatgaggctttaggccaagaatcccttttctatttgtgcattttagaactctactttggcataggatattaagggaaaactgtcctgtttgatttgaacttgatcattcttttaagaacaatcccagactatcttagagtgcctggtctactgaataatagaaatgaagctttggcaggatgaacatacagagttcagtcgataaaagtccgtaaaggatgtgacaagagctgtgttcaaccccaatagtgtttggctgtgtatgtgtgatttcattaggtagcacatcttttagacatggaaaacatccactggaatgctacttttcatacatcttgtgatgctggaaacaaattatatttttaactggaccatttaaaaataaagtataggtttttaggcaacccttgcaattattgaaataattttgtgtgttggggtaattcacagaattccagatgtatatatacatatttatccacaaattctaaaacacatcaatactaatgctgatgtcacttgaacaaagaatcaaggcatgaaaactgtaataatctactagatttgataaatgtaatttaaagtgaaggctaaggaaggggttgtaagataaaatgatttaaaatcaattattagcaaatcactaagatcctgaaatatgtgtgtgttattgacatattattattttacaaatttgtcacatgctacatatttttcctctggaaaagataaggtgtttggtgacactcaccagttatgagcactgggagacttgaaatgaattggtgtgcttcttaattacactcaccagggagtaatttctgctgggttagcctggtaggtcttgggctggagcctaaagagaaaagccattcctattctcagaggtgttaagctctagttagggagaatgaacggggaaaacccactatggtcacaacagaaaagaggaaagaaaaagcattctgtcatctttatgaagataaaatcactgggtttcatttaaaaaaaattctgttacagggtagaggatgcaagtgagcaggagacatgtatagggaaaaggtactgatgcttggtttaataccttgggaaattataagaccactggctaaaatagactctatgagaaaaggcctaagggacagctgttgatacttcagagttaattggaaatggaggtctagtggggtctggatgaggagatacgtgagagtaaagaaagcaaacaagtgcccgtatctccgtagttcccacagcttcgcatggcttagctctaatcgtcttgaagtatttatggattcgcagcacaccaagtgactcttctcagtgtggcttttagtgaaagggtgcagtttctctcgctaagtcaaagatagtcataaacctccttctgtatttaatgtaggtccttcatagaccaggtctcagtatgtcgaggtttttgaaagtatttcttttttttttaatttttttattagagattttctttatatacatttcaaatgctatcctgaaagtttcctataccctccccttgccctgcttccctacccacccactcccacttcttggctttggtgttcccctgtactggggcatataaagtttgcaatgccaaggggccatgaaaaaaaacaatagttgttgtcttgggtttaatgagggcacagacaacctgtggttctccacacctgtgtgaaggtggcacattgtgtatcctcacaggggcagctctcttgctagcatcctaatactggtatcctttgtatgtttgtttttctgaactctgcatccttcatggtacctctcttccctagagacagtagacaaggatgagtgctcatccttgtttttttagtcagttgattggttacttgaatttgaactatttttggttgacatgcctcctagatgtcttcagaggccagatcaataacagctgcatttgccccagtaagtgtttttccagaggccagacgggctttcccactcttcatttacaccaatgcttcagcacttttagcatcctcagactcacaggctgggcccgatgagctgccggtccccacctgccattcctgacacagcagctttgaaatgacaccctggaatttatatagaagtaagcaagttcccagaagagactgacactggtctggacacagccctagaggagctgtgactctggggaggcagaaattcatagattacatgcatttgtctgtgtcatgtgttaaactatatggtgctaacctggtttttaggagattcttgttaatcccataaagtcctcagaatgatattgttaattagttcagcagtgagatcctggagtatttaggttgaagacacattgattctaaaacttaactataaacaattcaaggactctctaactggggcagatcatgaaggcatctaatccagtactttacatccaaaagaagaaaagggaaggggcttcatagaatgccttgtacttggcctgtctgaaacatttgtaatgcagagttgcctgctgctgctgatgttagctatagtagcctggctaagtagtttatttgttatctcttgggaatgtttactccacctcatgaaggtagacactcttgttcctccctgtgctgaggaataaaaggattcatcttgagtgacatttcccaagtggcaaagccaggaatcatcaggcttgagacctctgactccttgaaaaagctgctcacctagctggcctggttctagccacagcatcaatttggatagaagacattagaatcattaatctttctaatttaaggtacagaatggacagatttttaaaaaatgttctggttctatgtattatgaatatttgttctaaatattatgatgccattttaagtctggctgcccaataaatattaactgtggccctctgtactctgccatgccatagaatctggacaatagtcactagaatttgtgaagtcctggggaaggccaagaagggactgacagaaggatgccccctggctcacttctccattcttgatttgagaattctgcatctccctgagctgtggttctgagaccatgttttcttaaccccactagctttttaaagtccaataatacttacattttttttatttttacaaatttacatgtgatgccaatataataatactaccatcactataccagaccattgtctctgccttcctgcagatacatatagatcaataacccaggttgtcttacagtttaccctgaaatacatatgacttctttgttcatacttgaaaatagggaaccagctccgggtgagcacagtttgctcttttctttccatgccagtgcatatggggatgggcttacagtctcaatcgtctttataatacaattctgaagctttagaaacattaactattatgaaatcagaaaaatcaaacagcatgaaatggaattctggcattagcatgttaattcaaaaatatgtcctagaaaaaaaaataccaataactagaactatataaccctttcactgtctgtggatatttagtaaatatatccctgggtactgaatgtagacttgttctttaaaccaatacaatattttatattgtctccatttgctttctgttttaagaatcagaaactctggaaagatttattggggttcctttgctaggaatggattcattggcataatgaaaactgtgactgtccttcactgttcacctgaaaccctgccttaggtcaagtctgggatatcagcagtgagcacacagtgtgaatctgcctgctatcagtacagtaaatgagcccaaagatccatgaatccatgatcagctactattaaaattcacagcaggcaagagaaaagattaacaggagaaaaataaataatgaggggtacagatgtcatttcccaagctaggcattgtagtgatatgccaagataatcctggctcttgagatgccaaggtaggaagatctctgtgggttcaggcttagcctgggctacagagtgagaccctgtcttaaaaatacacaaaacagtgttctttctcacggcttcaaaatgtttatcccactttgaaatctaatgatagcaacagtcaacaattctgctttatttaaactgatttaaagtgatcaataaaaatactatacaatattttcttaatgtgactctagagttaaatagctaacaatctcccaatttgatttttgttgttgttgttgttttgtaatgcaatggtagccaatattaacaagtactttgaagatctgaaaaaaaattgagttttattattacacagcagggaattttagcagcaaagaccatttagtcagctggtgaatggcaaccatgaaagaggtgtgtagcctcacgtggaatcatattaaagcgtggcccttcgaaacactgttaatatgataaggtagctttagccaattagctgttcttgctcatgtgtgggtagcctccttggccatgtgaaggccagcagttacacataatccctaggggatgtgctctcttgcgccatcctgttagcacaccacatcacagctggcatcaaagcaaaatgcatcagatatgtcaggaggccacagaacgaaacatctgactggttctgaaaaacctcaggtgaaaagcaaacacatgttccagaaagaaaaactccaccagtgtggagccacttctcttacctggtacatctcctggagaaacagtatctgtttcttggcacagaaaccaagtcattcttgggttggaaggattttgttaagaacatatcccaagagcttagaagggaaaatcctgggtagaattcctgtcttcaggatcaggaaaatcccaaagttacttgagccttaactttctcacagcaaggaagagctcgacagtcctactgattaaatcgttgtagagatttgaacgtaaaactgcacaatgttttatacacagacagtggaagccccttcacttggatgctgtttgaaatgtactaaatactcacattcacgaaacactttagactcactatacttagtttaattaaaatgtccatcaaaagactctaattgttccttggaacatagtctatcatacatagcctctgatgaaaagctttggggaggtcatgaattattaaggttctgaaacctattacaagtgttgtgattagggctggagtgatggctcagtgattaagagaactggctactcaagttctattcccaacaagcatacctggtggctgacagccctctgtacctctagctcatgtgttctgacaccgccttctagctgtcccaggcatcagcatgtacactggcaaacatacatgaagatacacatggaaatacacaagcaaaagtcaatccattctaaaagtcataattaagtctacacacacatttctgtgagaatttgcttgttgaacttcttcactaattatagcactaaagatgagccattggatgaaactgagtgcatctaaaatggcagaggtaggaatcagaaaaggctacactgttgcctgaatgaaccaccactgacttgaacatgccctctcaactcgcctcgctgcccttccttcttcatgggcaaaatgagtgttactactttaatattagagccatgggcagagaggaattagagttagactcactgtccgatgcttgcagaaaccatcctcatactggtttgtcataatttgtcttttgtggattcaatttatacatcaattaggtcttgatgttcccattccacaccaatattgcttgaatcgtttatcagaaacactggatgaatatgcccgatcacaagctctgagcatgaaagagcttaaggttcacgcgcacacaaggagtagacagacactggaggctcagaaagattggtggtggcaaacatagtacttggtgtgcaatctcttctcacttatatgaggttaggactgcttggcttttcctttgctcttatgtgtaacctaggaaccacactttttcttgacttctggtatctctgagagaatacacatggatttgtttgatgtggcaattaagttttctccataggcgactaataaaaatgcactagtacagccatgtttgtgcacagtgaaggataaggaaataaattagaaaaaaaccctatatttagactttatattctgaaatttactttctgtgtgtgcattgttttttcttctcacatatatccatgtgtgctaggtgtcggcagaggccaaaagacggtgtcagattccctaaggattagaattctggatgattgtgagcccctcatgtgggtgctgggaattgaactaggatcctctgcatatccaagaggtattctcaactgctatgctatccattgagcttacaacacgtttaaaaattttactggagtctcgcagcagatctagaaaactttgtgaccatttgagattgttactttatgaaaatttcagagcaagctttgtggaaagttttgtttctgccatttgataaggaggggggggttgtaactggaatagatagctacaattatataaatggggattattgccagggctcttcagggtattacagcctgtggggactcaagttccttatagacaaaggtctgtatttgcatggaaactctatgtggggaatcaccatacctattgtaatgtcccaaaggctcataggataaaggtgtggtctctgcctgtagaacaatgaggatgtggtgaggacgagagagctggaggccagtgagaggtcttccgattattgggaccctgcctctcctcttccccgttttcaccagccccattagaagtgattggctaactccaatcatatgcttattcctaacatgacgtcatgatgtgctgcctcgccccacgtccaaatgaatgcagcctctagctcttccaacttataagctgaaagaaacatatttctttacaggttgatatgtcaggcaagtattacagcaaccaaaagccaacacaatgcttgctctaatgttcatgtctaacaaatttttgtattgtctggagaaaagcaaggaaaaagctataataattcagaggccatttttaatttttggaacggttttcaatccacggtagtcagttaaatctactgacacagaagccagcggaatttaactggccccctttccgacctccttaattgcagcattgaatgaaaggttcattttactggcttttatgggagccttacagaattcatggaacatttacttaaggtagaccctagtaagtaagagttgaaccaactaggaacaaatgcagatgtaatggtactgaagggaagaaactctgggttggaggtcagtgtttgaggttagggaaacaggctttgaagctcgcagactgaaagctatcctgaaagagccaagtgcaggtttgattgctttcacaggttttactaaactccttctttgatcatcttataaaatgcgtcagcaatcgagagcatgtggctctgcagaactgtcctgaaatccgttcagctagaggctcctggtataacttaataacactacaatcacagggtgcacagaacttgcctggtttcctcctggatggttgcaggaagagattggcagtaataagggagacgctgctggcacattgagagatttctgggaagagggaggtgagaacggcacattagcaggagtgtgggagatgaatgtcaggccaagcatacatcagcaagatggcggtaggtggggctctgccaggaacttgttctgagctgatccatgaagctgtgactctgcagggacgggcactgacatcttgctggaggaggtttactctacatttgacatgggactttctcctcatttgtgtttgagatggagttaaaggagcctgccttccctttgccgctatcctattctgtacactttgagttttttaattacagtgggagccactgtgtcgatttctcttgctcttcacatccacctcttaataacgacaacagggacaactgtactttccctaagactggagatggtttaggggtttgcaacagatcctatgagttgatgcagtgtgcatatgattcctaattttctctgtttgccccttggtctccaccacagctgaccaatgggggcgggggggggacagttaaaggtggagcaataaccatgaaatgggctgaagtgttctgagtgaggccatgatcattgtaaagcattctccaggagcagtgtgtcgaaggcttggttctcagctcatggttgtgttgacagttgatgcaatctttaggggatcggaaggaagttacatcactacaggtagaccccaaccctttatcatttactctctttgtttccagggtaccgtgaggtgaacatctctgcttatttagaataaaatcataagacagaaaatatttgaaataggaaatttacaaagcatatgacaaaattgaccaaagtgatcctgtttagcgccgagtggcaagcatcagaacatattggcaaattacacacttttcatcaggaaacagtccatgaacacagggaaagaaacaccctttatgcacattgtctttattagggttttattgctatgaacagacacatgactaaggcaagtcttataaatgacaacatttaattggggctgccttacaggttcagaggttcagtccattgcaccaaggtggaagcatggcagcatccaggcaggcatggagcaggaggagctgagggtcctacgtcttcatccaaaggaagccaggaacagactgaacatcctcaggcagtaggaggaggatctctaagcccagctccacagtgacacacttcctccaacaaggccacacctcataatagtgccactccctgggccaagcgtgttcaaaccaccacacgcatgcacacagagatatttttaaaagtctgttggcttgaggtcttctcgtatataaccaagaatggtatagtgagtaatatgggagttctcttccttccttccttccttccttccttccttccttccttccttccttccttcctttctttctttctttctttctttctttcttttttttggtttttgagacagggtttatctgtgtagctctggatgccctggtattcactctatagaccaggctggcctcaaactcagaaatccgcctgcctctgccttccaagtgatgggattaaagacatgcgccaccactgcccggcaggagttctctttctaatcattgtaaaattagaaagatcttgtatcctccttctctactgaatagttggttgggtgtgagagtgttctggtagaatctttaggttcattaatgtacagagtcctgtcatctacaaaaatacactgaattccttagttgctacataattttatatttccaccagtggataattagtgttcctcatctgtaacaccttcatcagcatttttaaaatcatttttctgttgaggagactgaatctcacagcagtcttaatttgaatttacccaatggctaagtgtattgcacacatcttcaagtcttttttgaccatttatatttcttgtacttgagaactgccaatatattcattggtgcattagttgactggatgatttgatttttgccttttcacttttacagttctttggatatcctagatatgaatcccctgtctgatgtgtagctgttaaagactattgctctagttcttcattctctttccactgtcatgattgtgtcctttgctgacaagctttttgatttctagtgatcagattataacatatataagatatatatgtgacataagttcttatggagtactgtgatagccccagcattgcacttacacaagtcttgtttctgctattagtcccctagctctggggactgatctgctttcatatcaactttgtaattgttgatcctattctatgagtagaatcaggattttgatgttgattgtattgtctgtagattaatttctttaatagagccattttcacagtatctatttaaccaatccatgactttgatggttcttcaaatattctagtatcttctttaacttttttttgtcttacatgtccttctttagtcctattctaggttctgtttttaaaaattactctgagtgtaagtttccttttaatttatttcacttatttcattatttgacgttattattcccacatggaaaagctgctaattttataagctgatcgatcttgtatcctccttctctactgaacagttgattgagtgtgagagtattctggtagactctttaggttcattaatgtacagagtcccatcatctacaaacaagaagaaattgacttcctcctttcctctttctaatttcctttattctattctatcactgctctagctcaggatgtgaacactatactgagtaagaaagtagagagtcactactcatctctcatatcaggatccagaggccctgcttttaggtgttaacggtttagagtaataattagcagtggttttggcattgatagtttttatcatgtttagatttttgttggtttctagtcctagtttttgttttgttttgttttgatttttagcatttttatcatttaggggcattgaattttgttgtgtcttttctgcactggtaaaaatgatcatcgactgatgtccttaactctgttttcgtcttgagttagacttgttgattcgtgtacagtgaacaaactttgtatccctggaatgcaagttaattacgattggggatcgtgtatgatttccttgatgtgttcttcaagttttgaaaaatcctattgtgaaaatttacatctgtattcatcaatgagatttatctgtccttctctttgtttggcattttccatttctggaatgccagctttgtagagtgagcttggtaaaggtccgtttctttctgttttatgggacagtttgaggagcatagttattctcttcatagttagctcttcattaaatgtttgaaataatagaatattgaatctgtctagtctagagtcaaattgggaaaatttggtctagagtataatctaaagtaaaaattgagaaaaaaattttacaactgctgtagtctttctcactgtttatgttatttgtatatttctgatttaattttcataagtcttatgtgtctacaaaagtactgctttattgcctaaattttccacaggatccagagaagaacatatcatgtttttgttggatatgatattctatagacatctgttgaattcatctgaaatatagtgttgtgtaactcaagcatttattggtttatattttattttagattgtcttttgaaaggggagatcagggtactgaaatcacttactcttgtatgaagatgtattcaaaaatttatgtctatttttgtttgttttataaaatatgaaggattgatgcttagtgcttgtattttcacaattgttatatcttcctgatgaagtactcctcttactaatacatagtggcctttgctagctcttgagagtaattttggctttaagtctacaataccaactatcagaataactagagtagattatatttggtttctgttcatttcaaagactggcatctctcctttgactttcaattgatggatatctttaccagtgggtacatttcttgcaacaccatatgattggagacagtttctaatccaatcagacattctattagtaggttgaggcactcatgcttgagttcattattgacacatatttatcaattcttgttgattttgggggtgtggcttaaactactcttcttcactttcttttctgttagaaccagacatggcctaacatgaccctgttagagctgtgggtcacttttttgctgtcctttcatttgttttagattttcttccctgtgctcttgtgattgatgctctttcattatcctctgtgtattacactcatttaagtctcttcagcatgctgctttgtggtcatgtgcatcccttgagtttctcgtccttttagaaaagatgtctctgttggagatccccatcttagtgggctgctctttattttctgggcttgaatttcaggctgtcaaccagagatcggccattatattgataattctacctatgttagtgagttgctattttctccttataccctttgtggcatgcatagtgaatgtgtatgtgcacatgtgtgtgtgcatgtatgcatgtgtatattcatattcacggtatatgttcatataagtgcatgtatgtggacatccactcagtgtacccatatgtgtagaagcaaatttcatccttggatacaattcctcagttaccttcctctttgttttcggagacagggtctttgattggcctggtgttctgcaaataggataggctggctggtcaatgaatcccagtgatgcactcctcctacctcccctatgctgtggttacaagtatgtgccaccatgactttattattttttttaatgtaggttctgaggacaactgagctattccaccaatcctcttaatgcttcgaagactgtttcttatctgtatttttgtcctgctgcctcacaacaagtttctcttgtacctcttaaagagatagatcctctggcagtgttctgagtttctaactgcctgatgtactttgaatgtctgtttctttctacagttcaggtaatttcctaccctgacctcatgtaattccttgagccttttatgtttgtctcagcactctcttctggcctgtgtgccttggtcatatctgaaattcttggatgttctgttgttttattatttttttcccataatggtttttgaaggctacggtttgtctgaagtcagagtctgtcttgtaggcatctgtcagtcatgagggctgttctttatcatctctctcaggtcacctggatcatctttcctaaatctgtaggctcaggatttcactcctgctccttccttctagaagtgacattctaatgcattgtgattccacttgcctgtggcatcgcatgtcccatggttcatcatcagtgcctcccatctagactcaggtttcccctcatcccttgctgtagttgtatagcaccctttcatggtgctagagggaacggtgggaccttaacatatggggccagtgtgaggtgctatgtcatgggtagcacaccatgagattaacaagcctccatggccactatgatgtgttccacagacccaatcgtccaggatatctgccatggactgaatcctctcatcctgaacccaaatcaaccatttgtcttttttaagctgctcatcacaagtacttgagacagtaatggatgttgactgacacactccttttgtaatattgtctggaaaaaatccagtctccacctcctctgtcttataaccaggaacccagagagggctgaagcaaggcatggagccatctggactagttttgttctgaaggcatgctgattcattttgagtgagtacacgagactcccacttgtcttcatgcttaactctttgtcttctttccccagacagatagcaagtccacgggagatatttcctactccttaaagtaatacctcttgttttgtcttgtactaatagatttgattgtaagggaaattccatagtctcattctgccctatctccctcgggatcctgcactccacactgcacaatcgcacgcttcactgtctgggttctccataccctttacagctcttcactcattttctcaaagtctaaaatttgaaatgtcagagagttcaaatctctaactatttttcttcctgcactcacttcttgcttgtaaaatgatgttcaggctcatggctttaaattctgcttgtatactgataactatcaacattgagagctccgtattcctaatgtcatttcaagttcaacttgaaaagactgtatcttgaactctcttctgtctctaaacaccttctttgagaatgctctcaagaagtttcctttgctctgctcatgtctggatgttcagtcacccttgacctctctgtgtgggatttcatctcagatctataatattccactaacaaatcccagtggcttcaatacctacccagaattatctaccttgatgactggcatcttcctccttagtgtatcttccatccctgtagctcattctcaatgcacatgacagagtggttctgcagagttgtccctccactcccaatgtcccaatgcccttctcattttattatgacgtaacagccacagttctgaaaatgagtccgattgcatgtgtatcaccttctacatttatctaatattgccatctacactcttccacaaccaactgtcctctctttaatttcccaaagttccaggcatgcccaggcattgttgtcttcatgcccatagcctcctcttccaagagtgctctgcccttagtcacataggcgtcacttgatcctctcatgccttgctgttgcagcctcatttccctttgcccacagagagcttcaattcaagctctgctctatgcttcttttcttctcactccactgtgttttcatagagaactctatagttcttccatttttaatatatccatcatcttgtttactcatggcctgtgtctttattatttctctgaatgaagacaaaggcattatctgctgtgcacactgctatattcctggaagttggcagaatgagtggcaggagctccagctgcaccaagcagctactgaatggctggaaacatagactttcacatttaccacccacagttcatgccagcagaacagctagtgctgtgcagagaacagaggggacattggctttattgattctcagtaggaacacagctaaagagtgaaatggacgcatgccacctggggagactcagagagggctaccatagagatgacagttatggtgaagatgtcaatcacagtgttgataccagattatgctttgtgaagttttacatatagaaagcttttatctctaactttgattgattttaatccttaagagactctcaagtcaagactttattcaactttttttttctgctgatgagaaaaactgaagaacaggtgttgtccttcaatagcattctgaaaactgtagttactggaacaatacctatgcccacaccctactatcccaagaaaaacagtcatggatgcccaaggactggggagttccaaacaggagatggcaaaacatcattgagataaatggaaataattggccagcgttagcatgataattcctaggaaattatagttaaactccgatggttaacatcttctaagggtcatttaatagatttttcttcactgtaacttacagtatctatacatgcagagaatgttcagtgatcaccaattggaacatgtacatagcagttcacagcaaagatcttcatgctctggctcgatagcttgaaattctagtgacagaaatccctctaaaccttgacatatgtgcttatgaaacggcccgccaggaaatggctgttctaccttgcagatgaatcaagtactataattgggactgtgtttatgtgaggagaagcgaatgaatctggagaaaccgaacaagacagttctctgctctttctccaaacagccccagcattgtcatacatacgacctctgtttggtgatttatagagatcaacagagtttcacctttcagctccaccacaaccctggggagtaaactttaagaagtctttgctatatgtttctctgaatcttaatctatagtgagaaagatctgaaataaatgtgtgcattagagaatgggagagcagaaatagaaaggcgttgactggctttgttattttcatgtagctaaaagtggctgaggcaaggtttaatgtggctcatcctatctcagtgcctgagcaggagcagtcctcaggctgtcctggctgtcttagccagaagatacacagtttcagggctggagagatggctcataggttaagagtgcttgctgcacttccaagggccctgagattggttcccagcatccatgcctagcatgcatgcatgtgcacacacgcacacacacacacacacacacacacacacacacacactttaataaaaaataaattttcaaacagaaatgtatagtatatcaaataatttaaagtcaggctgcatggatttatgaccatggacctgattcttaaataatttcactaagacctgccattctcatttgtataaaacagaacatttttctaaaaaaattaataataaccttgaagattgaccaaggtgggacacaagttctcagcacagaccatagagcatggtgtttcatatgtgttagctgtccaggcacatttacacgatgtcagctaactagctgagatgtgtttgtccataacctatttcatgtgatgcaaatatccctatctctaaactctgccatcaaagttcgcatggtgttgtatttcccatgtgccccctgaactccccaaaatcaatggcatttctatttgtcagggtatttcatttgaagcaggactttacataggcttccatcaatccatgcttaatgtaacttaaagcaaatatattaacgatgaataattaaaatcatttgcaaagctgacaatggacatggatatgtcattaatctcgggtgcatcacttccttgggaggtccacggagctctgtaagaacctttaaggagacaaggaaatggaattcacatattatgtgctactatttttgccagcttcttcaagtatttgttcatctcttctcatggataattgacagtacctctcctttcacccacccacattagaggaaagggcagcttaaatacagtcaacctttaccatgctcgtcactgcagtgaggatgcttggactgtgtttggatgtttgatacagttggttaaagaggaaggagaaggaaaaatcaataaggagatggtgatagaatttgacgttaacatgccaggtccccctgaaggagtgggtcttggctcaccaagtgagattttgtgatacagcaggatcagacaagggacatgtctggtaccgtgtagataatgcagaaaagctttgcttttctccaatgtttatgttttgaaaaacatccatgtattctccaaatttctatcatggcaaagagtgatgcagactgcttttgctatctatgggagacaggattctcctagcatgtgcaacccctggatgctccagtcctctatataaaagggcacaacatttgcatattaattctgtattatttatgatacttaatgcaatgtaaatgatccacaattagttagaatttttacataggggaaaagattaacaaatacaaatctgtacatacataatgccgatgcatcttacaaagcattttatttactatttttatgtgtatgaatgtcttgcctccatatgtctgcacagatgtgcattcagagcatacacaggctagaagagggtgtcagaatccctagggctggggttacaaatggttatgggataccacgtggatgctgggaattgaactctgggtcctctgcaagaacagtaagtgctcttaacctctgaggcatctctttatccccagtagaaacattatttcaagaacttttgaggtgtattttgttgaatttcgatgtagaacccggggttaagtaaggtcatcatgtgaagtgtagagaaatagtgtcaccgtgcctgcttatgtgaagtgtgttcgggagtggaaagtgtgggcctcagaactcacaaaagcagcaggtactctcctataaggctacagaaactaccattccgtcactgttgtaccttgtctccatggtttactaatttggcaacatggtagaagcatggcatattttgctattgttttaattttcctttgtgtaactgtcaatgagaaatatcctggcattctgttttgatgctttgattttctcctgtaaggaagatatttagaagcaatgatgtatctcttgcctggcacagaaattcctttttctgaatcattgctgctctgggtagtggggatagtaagtatgcttcccatgttgcacgtgtcctttgctattgtttattagttcattttctgagttcatacttggtatttttcaacatcgcatgcaaggactgaataataaaacattcaggtttcaattccgtgtttacatttttgctgagagagttctccttaaccccaaggccacataactatttattttttctataattatgttgccttttggctttaatatttaagcatttacttcatattaaatttagtgttataaactgagtgagaggactaattttgtttgggtggaaaattgcttacgtgtcatttaataaacaacctgcttatcggcaagactgcaaactccgccattcacatgcaatgtgtaatcctcagggatcatcatggaaaaatagctgctcagacaattcatatttttgctatattcttgaagcatagtatatacaataatttttagttattcttagacaattccttcatattaattaatgattattatttcatcaactcaattccaggcagctaggatgaggctcttaaagcccatacccacagtgacacacctactgcaacaaagcctcacctactccaataggaccacatcttctcatagtaccactccctgaaccacgcttatgcaaactctcatactcattagtttttcattactctttgaggattttgtacaatatattttgatcatttttaaccccctctcccagctctcccttgcctactttgccatccatacaactctgtgccttaaaacctaaccagataaatttgtgctgttcaggtgtatcctacatatgtagccttccactgagcggtggtctgcttaccagaggtagactcctagagagaactaagtcttcctctttcaacacttagcaactgctagctgtagcatgtagttttaagagctatccgctctattcaatagatgactgtgagcatccacttctgtatttgcactggcatagcctcacaagagacaactatatgtcatgtcagcaaaatcttgctggcatatgcagtagtgtctgggtttggtggctgattatgggatagacccctgggtgggctagtctctggatagtccttctgtctcagcttccaaactttgtctctgtaactccttacatgggtattttgttctccattctaaggagggacgaagtatccacactttggacttccttcttcttgagtttcatgtgttttgcaaattgtatcttgagtattctaagtttctgggctaatatccacttatcagtgagtgcacatcatgtgcgttcttttgtgattgggttacctcactcaggatgataccctccagatccatccatttgcctaagaatttcataaattcattgtttttaatagctgagtggtactacattttctgtatccattcctctgttgagggatatctgggatctttccaacttctggctattataaataaggctactatgaacacagggcgctcaatggaggagctagaaaaagtacccaaggagctgaaggggtctgtagccttctaggagggacagcaatatgaactaactagtaccccctgagctggtgtctctagctgcatatgtagcagaagatgacctagtcggtcatcattgggaggagaggcccttggtcatgcaaagataatatgccccaaaacaggggaatgccagggccaggaagcgggagtgggtgggttgaggaacagggcagagggagggtgtaggggacttttgggatagcatttgaattgtaaatgaaggaaatatctaataaaaaatgtttaaaaaaagaataaaatctcaaaaaaaaaataaagatctatccactctaaatcctgctagcaccagcatctgctgtctctgttcctatttgagtgcatagcccaagactgagaccccatgtttcttttagccaacgcctctgccacaaaagctggctctgcctctccagagctccaagatcattctgagttcctgccatcagctgtgggcacactctccccagctcacactccactgcagttaccttttccctggagcttggcccttcgcccagtcttcctgttccaaagcctggcggaattctgccccagctatgctccttccctccagcccacctgaatcactgcgaatggaaaagaccagacaatcttagtttcaaatcaacagatgacagaacaactgggtgcggagtctatagtcctaaactcatcaactattctatgttggaaatcttgtggtggcagaagccgccaccaggtctaacagttcccagtctacattttgcctgcttttgctcctgctttgaagtagtaccaaagggacatttcttccccgtcttcctctttcggacgcagaaggccctcctcctcctctttctcccagcgattagcttcttgttttctttgttagccaatcaactaattagggggaaattcccctacatctccttagctaagggcgggatttggttcccacttctcttcacactgagatctggtttggcttgggcttgcatggcatgcgtgtgctgtcacagccacttcaagatcatgcatacagctgccttgctgtgacctgcacacactggttcctggattcacacaccacctttgttccttcagtctttctaccctctcttcctcaatgatctctgaaccctgagtggaggtgatgggatatataacgtgccatttagggctgaggattccgctgtatctggttttctgtacaatggccagtcattgatttctctgttagccaccatccactgacagtagattttccccatatttggatattatttcagataatatgatcttactttttctactgggttttaattttctttagctcactcatcattgttaaatattttatcattagtgttatttccactttaaaaactctctgtgtaatgtattctgttttacacaccgacttttgctatttgaatgttgtatgggaccttgcgtgcttaatacagtgtgtggtaactttaccaagtacagggccatgtaagccatccaaggcagattttctaatttccttcttaaaataagttttggcatggataattattcaggtttcaggagcagtgcacactgaacaaagcttcagtcaacacactaagcaggccccacacctgcatcatttgtgatttccttgtagtgagaatagtcaaaactgtccctttgttccttcttttctcgtgtattctgcaacactggtgactgtaatgcagtggtttttaggccttggatcttagcaggcatctaagctggtgtgattgtcttagcacaccagaggtctgggcaaccttttatagacccatcattgcttagagcagggaccttccttgctgatcatgttttatttaatgtttgatttctctttaagtttcttttccttttatgatacacttgccagatatttccctttatgaagactgccatgagtgtttgcaccctcgtgcatgtgtgttccacttgatgtctctaataatcataaagatagagcattctatctctcggtacttacaacctcactgtttcaaaaattaaatatgatactttcctttcctgaaagtccaacttcctaggattttctctaaatgaccaatgatcaattctttgatcagtacattgcaatgaaaaccccctgttgactcttctgatttcagttcagtgggacttaaggcatttttattgtttttgttttgatgatatccacatccacccttctccccccacctaattacccccaccccaagggcttgcatctcccaatttcatgtgttctgttttaaacccaatgagtctggccatgtgtaaatagtttaacttaggatatgatagataaaaataatatacatatatgaactaatagaagatatattttaatatttttagctcttcaatgacatatgtagttcctttaaattatcactataggtaaaaaaatcaattttgatgatatcattattatactatgtttctaatgagatgatcatgtggtttttgtctttgagtttgtttatatactggattatgttgatggatttccgtatattgaaccatccctgcatccctgggatgaaacctacttggtcaggatggatgattgttttgatgtgttcttggattcggttagcgagaactttattgaggatgtttgcatcaatattcataagggaaattggtctgaagttctctatctttgttgggtctttttgtggcttagttatcatagtaattgtggcttcatagaatgagttgggtagagtaccttctgtttctattttgtggagtagtttgtgaagaactgggattagattttctttgaagatctgatagaactctgcactaaacccatctggtcctgggctttttttttttttttttttttttttttttgggtaggagactattaatgactccttctatttctttaggggataaaggactgtttagatcattaacttgatttgatttaactttggtaccttgtatctgtctagaaacttgacatttcatccaggttttccatttttgttgagtatagccttttgtaggaggatctgatggtgttttggatttcttcaggatctgttgctatgtttcccttttcatttctgattttgttaattaggatgctttccctgtgccctctagtgagtctggctaagggtttatctatcttgttgattttctcaaagaaccagctcctcgtttggttgattctttgaatagctcttcttacttccacttggttgatttcgcccctgagtttgattatttcctgccgtctacatttctgatatgctgattaataattcacaatcagtttaattacctttcattatgtcctttgtgaacattcatggagtagtgtacctgtgtatgcaagcacatatgacatgttgtaaaaatatttaaatactttacctacaagtgccacatggcttgttcagagtagtgttctctgtgttaggccccgcaggcagcctaagattttgtgagttcatgccatacagatgttaatatccagtgcatttagagctgtaggcatatgtaaaggtggtctgttgactctcagctgccttttacaactatccctagatcaaggtctcatcatatgtctaattaaattgctggtcacatttaaagctgcagccatctatgcacagtagaaggcctagtcatctttgcttcatggactaactatgggcatgctggtaagtccttcaccttaccctgagaccagagagttgtgctgctgtatgttgtcagtctgcaccctgcatgctcttttggagcagtaagttagccctgagatagtatagttgaatttgactggataaaagtgcagtgtgaccattgcctcacacctcttccccattcctctcttaccatgatggaatgtataacccccaaaccatatgctaaaataaatccctccttcctcttcttgaaaaaaaaagtgtaacctaagcgatccctctttccatccaagcatccatccatccattcacctgttcattgattcattcatataaatgccacttgttcttgactaagcagtttatatagaaatatgcctttgtataattgggtgtatgtatgaattttcaaagtctaaatagcatctattaattggatttaaaataaactttaaatgagttgaattagaaagtcaaagaaatctgcatgtgtgagggagaaaacatatttataaaccaagctttaaaagtgttattatattacactgaaagattatagctgccaactaaatgaagctgcagaacccagccagtttcgattaagctacttgggaaaagggtctgttttataaagctctgttctttgtactgtatgctagagcatgcagaagactcagaagactcttgaatcatggaaactttatgctacgaagcaaactattctacatgaaacagagttagaaacctattcccaagttatatgtccatctaaaaaattagccatattagaatatggatattagctgggtgtggtggttcacctgcactctgaaggcagaggcaggtgaactctgtgagttccaggctagcttgttttacataattacaggacaatcagggctatatagtgagatcctgtcttgaaaacaaacaaacaaacaagcaaacaaacatacaaaatgtatactatttttaacaactctaatacacaaaataatactatgtgtacattttttctgtcaatataatacattctaagaaattctgaaaaaggaagggatagatttctattacttttagattggatagctgtcatgttatgataaatttcattcctaaaattgtttatttcactcttagtgtaaaaaatacatattgtaataacaggtatttctagatttggacaaagtatcacactattaattttttaaattgtatatctcagattggagccaagtggctccatgtacagggatggcgtctgagaacagcagttggcacatgagggaacagagtctctgcatgtgcagataactgtatggctttatgatgctaaaatgactccattagaaatatcgttatcttcacagtaagacttaaaaaacattcaaagtcatcatgagtgtttgccttcaagtatgtatgtgtcccatgtgtgtttcatgttcgcagtggccagaaaaaggcaccagatgccccagacctggagttatagacagttgtgagccaccatgttgatgatggggactgaagccaggttctctgcaagatcagccagtgctctaactactgggcagtctctgtagcctcaggatcttggttttaaaaacagtttttttaaagtttatttatttatttatttatttatttatgattaagctaaaatctgtggaaaagaaaagattatctgttgaaaaataactgaggcattaaggaaggcttttcaacttgtaaacagctccaatggccatcctttttaagattcagaaaaaaaaagtcacaattcattttgcaaggaggatattttattatattggagttaaattgtcttgaaaatttttgtcattttttagggggtgggggaattctctcctgcaaggaaacatgacaaatgatttatggtccttgctcggcactgctgccctgtgctgtttgaaattcaaaagcttcaagaaatgaatgtacacccacacctctgctttcttctctttccaggtgcctcccattctccttgataaacagttctctgaattcactccggacatcacacccatcatcttggctgcacatacaaataattacgagataatcaaacttttggttcagaaaggtgtctcagtgcccagaccccacgaggtccgctgtaactgtgttgagtgtgtctccagctcggatgtggacagcctcaggcattcacggtccaggctcaacatctacaaggccttggccagcccctcgctcattgccctgtcaagcgaagaccctttccttactgcctttcagttaagttgggagctgcaagaactcagcaaggtggagaacgaattcaagtcggagtatgaggagctgtctagacagtgcaaacaatttgccaaggacctcctagatcagacacggagttccagagagctggaaatcattcttaattaccgtgatgacaatagtctgatcgaagaacagagtggaaatgatcttgcaaggctaaaattagccattaagtaccgtcaaaaagaggtgagtgccgccagacacaatccatcaatgcgatagaatcacatctctgacaagcccagtgctactcagaatcaatttaacagcactttgattctcttgtaaggaggtggcatttaatgctggccggattcataattatctccacactgaagaataatgataagtggttcaataatttgaaattgcttttggcacctgcatgaagcacgtacactcacttgtcataaaagggaaatccaacaaatttggattccccagacgaggtggagaattttgactctaccgtttataactcttgtcagtctagacgctaaactgtagagggtcacacacagagcttcttgagtttcgcatttacttaataaaactgattttataatgttcatatatataacatgctctttacaaattcataggatgagaaacatgtatgtatgggtgtaaggactattaattaattataagctattctacttgaatgcattattaggaactaacacaagaagagtcttttgttcaacagtaatgaatctattggcgctttcttatgtttgctcattttcttcatctgtcaggaatagaggctaaagaattagttgtgggaaatagctattcaatgaaattctggtagatttgataaagaaatctaaaccactcacatctgtacctaaacaactcacatctgtacctagaccactaacatctgttatcagtcacaatatctgtttacatcccattctgagagattttctttttttttttttttttttttgtcattcggatgtttgttttaacttccataaaatatttgttctctctcactcttgaaagaaaataattacctatttctaaccaagatggatgaaatctacattaatatggaaaggatgggtatagaaaagagactaatcaattttaccttatttttattaaaatttatttttattttatgagtatgactgcctgaatgtatgtgtgccatatacatgcagtgcctacagaatccagagggtgaaatcagatccctcaggactggagttacagttggttgtgagtggccatgtggatgctgagaaaggagtgttcaagaggagcccgtgctgttaactgccgagcaatctctctaactccgagacgactcaggtttagagtggtcccttgcttttatactgggcattgcctgttccacatcagccctgctgctttcctgtcgatatttactaaatgtttcagattcagaacccctgaactcactttcttaggttttgattattgtgtagttctcatagcacctgagactaactgaagtaaccacccacccccctgagagtgacaggaacaacgaacggttctgtgtacttcctcagactctgaagccactgagtttgcaacgacttggaccttgggggtccttatgcttaagaatcaaggacccattgtctagaagaaactaaaacaattttaacatgcagcagacagatgaagtgttgaaaaatttacctgattttgaaagttctaaatacgagaatgaaaaaaaaaaaatccactgtgagcattgtagcttatgccatgatggatgtaggcaacagggtccaagaagtcacaccttgctaccggtctcatgtgagaggcttgttcagaaaaggaggagcgaatacagacgctgcctctgagtgaaggaattaaaaaaaaaaaaaaaaaaaaagaggggaggaatggagtcacttagtgggatgtagtgcatgtgcaggagcaggaggaggacatgcaacaccagcaacagtgagaatgtgccccccccccccgcaccccaccccctgcagctagtgatgacttgtcctgatttgccaggcccctggggctggccatggaggtgcctgactgctaatagacaggactcggttagcacagcatcatgattgcctttcattggttctcttcagggttagagcatttacaggactggctaacagtcgtcaaagtcatctatgtgcagcattgattttttttttcccctttatattgtgattacaataaaatcacccagatgttcaaactacaaaacaaaaaaccaaagaggcagtctgccaagttcaagtgttcatctcagcagccctgaatcaggtagttttatttgtttttcttttatttacttttatagtttacactgatcttattcctttagttttaacttcactctcagtcacagagactttttgaaagccccgcaacaaacttctgataaattgcttttcagtatcctcctgacagtgcttttagtgagacgcaatcctctaagctactgaattcatgtaaaaaaaacaaaaaaacaacaaaaaaaaagaaaaacaaaaacaaaaaagaccaagacatgttggcttacaaaagagcttcatacagctgaatgattctttcgtttctccgtcattaaggcttttgactatgtttcacataactaattccagacagagctcagggcccttgttcctgcttgatgacacagctcagccctccataccccttccagtcaaaccggagtgacagtgaacacatcaaaccattaaaaatatttatcctccttaatacctgtttctttatctcggttctttgtctacttcatgattttacaaagtgatctcgccttcaaagtttggggaacaaaagtcaccatttaagtcccttgtttgtcatatcaacgtcaagacaacaaacagcagaagggaaggcatctgaaccttcccaacagcctgtcaggatgcctctgttattctgctaatctgtagctgtgatcttggaggtaataggacccaccaaaacaccaagatgagagacagactaaataaaacctgtaataagaaagtaagacttagtaatggccttttagaggagtgtttctttaaaaaactattcgcattttttcctttcatccctagagacgtcagtggagaagaaaatgacaataattcctctatggctgctcatgaaattcttcatttggtatcaaagagcagttttttttttctccagggttgacagttttcatgaagcaacgtaaaattgtttgactgatggtagcataaaaatatctgtaataaaattttactcttgtgtataccctttaaaatcagaaattggatttcatgaaacatatttctagattatccagaaactattgacctcaaatatatttgattctaaaattttgagcaagaccctgtgtattaaataaaaccctgctttagtggaatgccctgccttccgagtttttattttaggttttcctcggcttagtctaaacaaatttgaggtttgagtcaggtctgtgtctcattccttcctactaatctctaggttactcaagtccttacttattcttgaatgctcagatcacagcccacttgccctgggatgcatccttgtttggcataaagatcctaattgtatacaaaattatgagtttcatgttaggatagtcatcacattgactgtgatttaaagcctttcaggaagctaatgtgctggtgattgggtagggaatagatttctattaaaaaaaaatcacttccctgacaactccctcattatatacaccctatactgtgctgtgctaggcgcgttcccacctggctcaccagtcttactgtgtcagcagctgctcagcaacgtgtacacctgagtgaagtggagatctctcagctctggacagttccgtgcatgtttttgtatgcttggttttcctgattaaatggcagtgtttacagtaatctcagaaatagttaccctatgaagccatgcactgtcttggttgacttactattgctcataaaacagtcaccaaaagtagcccgaggtatggtcggggacatgcattaggaagcttgtcacttggtctctgccataatcttcaaggatgtagaatttgtgaaggtcaaaattatttccatgctgtcattcctcatgtttgtaatgtcactggatgtgtgcagagagcttgacagattccctaagcatttgcgtagccaaaatcttacctaggttcagtcacacatcattgagaacactgtgaaaaactaatccagcagcggagtagcctagatattgtgtaacagaaagtaaataaatacatccaattcagtgacacaccaccgatccacatctttatgactttgcaaaaaaaaataataaataataataactacgtttaatctacctcttcctttaacagaagcttgtcagcaacgttgtggtgttggatgtagctttggcactaacctgggttcttgtgagttaatagggttggtaaagggaggagagaaaccaacatgagatcagcccctctgctaagccctccttatcttccttttatctagccttgattgaactgaatgaaaaaccgggaaggccctgtcagttccacctcccactgtatgggaactgatgccagctctctagagctcctcggcaccatccaagactcacggttttatgtttctgaatttatctgaactttcatggtcaagaaatgatattggtatcaagggagacacaaaggctgtagccctaaggagtgtgccagcagacaggtgggtgatgcacactcacaaaccaaaaacaccccaagttaaacgcaaggcctttgatccatttgtaagctatctactgctaatgatagctcaatccaaccttttacaatgcaaaccaatgaactcattaaacataaacttccaaatgccactagtgctctgtatcaaagaccaacttaattgggatgctggaaaggccactatgtgcttttgataggcagtggggggcattaccccttgctgtctgtctctgtctctgtctctgtgtttctctattcctatttatcatccatctatcatgtatgtatgtatgtacgtatgtatgtatgtatctatctatctatctatctatctatcatctatctatctacatatctacatattgctttaaggatgcgcttctacctaaagtcacccctaaaataaaatcacagaggaattgatgatcacctcacttcctaacagtttcataagaactgttagtggcttggtgaacagtgatcctctccccatgagagtgaacagacaaccagacaggttcaagaacgtcacttcatgaaaccacatcaagttctgtaaactgcataggaggggtcacccttcctgtagatgcacgttctctgctgccgctctgtagcaggtgctcacagaatgctagggcctgcttctttgctccacatgcttgcacacacctgctgttgctatggatctcaaattcccaggtgcatctcctcagcttctgtctgagcctcacactttcacgcatttctgtgcctgccaccaagtaatggaggacgcgaatgcctgttcaggacttgtcagtcagccgaaagcacgatgacaggtcattaggcatttaatttaacactaggttttaagagcttggaactcagcccctgtggatttctttgcagctaattaaatgacatgtaactaccttctcccaattcttatccgaacgtaattacatttttattacttctgcagttaaacttgtgattgtgtatatctacattatataaatgtttagttagccttttacaagtgcactgattaagaaatcccagttccacgtcctaaagaaaaaataaagtagcaaatattatctttaaattagacactgtagttagcttatatttatttttgctttaaataattggaaaaataatcaaggagcttatttccaaagacgtatagaagaaaagttttccatggccaacaacactgggttagttgatgacaatgacattgaaaacttgtactgtgtagtagatgctttcccttggttctgggataaattgcttttctgtgtcgcctggtacttctggcttcacgacgactgacaagcaagagctagcaggtggtttccattattcaggcacagttgcttcatctgtcagtgaaggcaaaccatggcatctctttcttttgcacatgtctgcacaccagaatttcagttattattttctctctagtccatgtttagtgacctgtattttcattgtctctcatcactaagtgaagttaaggacttgcctttttccacagtgaattttcccccattctgtgtccctggaaaaaaaaaagaataaaagaagggtttcctctggaaattaataaaacacaaatatagttcccaataaatcctctgtggcttcaacacaagtatcctccaagatcgtgcgggcgagaatgtttccaacttatccctcttcctcgggttgctttgatcacaccaggagcgttcatcctaaacagagttattcaatgttttaatgattggagcacatgtccccagtaaaagtccctaggactgacaatacccttatggtagtttagtgacttgtcattctgacactaagctccaaagctagtacccacaggtggctcccaggagacacagctgggggacaggtttttgttgtttgtattacactctccccatcagctttgcgaaacactctctgcagtagcagctcaggtgccagttgctgtgtgctgaggaaagcctgcttcccatgtctgcagcctaatgcggtgtgttgttaagtgctggagaccattgctattctccatggctttctcaaagcaccgatgacttttccaattagctccaggttacacctagcataggtcatcctttgtcctccttttcctggagtgaagctaggaagcttgttcgtcgctgctaaggcaaagaacacagggacagacagtggaagcaaccagagccctgagcaaggaactgctggatcgtcaaaggatggttcctgtctttctgtaaggtttcatgatgttttaagtatctaatcttatgccagagtccaggagcagaaaaacaagacagtaagcatggagccaagcttgactttcttctagaacattcctagaatcttgagccttaatcttactaaaataatatgatggagtgttctagagatacctccttggagcccaggaaaatggttcctaactttgcctagggcttttatgggacgtttccagaagaagcctgcatcgccgttcattaggaaagacgttagaagggaagactgtgaagaggaagcaccttcaagctgtgtccaatcccttctcagtctcactccgtggcccctcagtggctcctcggtataccgtgcagttggtccagtccattcacaaagctgtgtatccatccctcagcactcacctccagagcctgcccttttttcccctaactgaaagtcagtgatctctgtgtgacatcatccatgtctccaccctacaccccagctctcctcagccccgtgtgttctgtgcctttactttggggatgttaacttagtcatttctgtgaacgtctcagggagcagagacagtcacacacagatttccgctcaacaagattatgaactatcacggattttgtttatgaaactaaattttggaacacaggtaattaagccccactcttcctctctggcagatttcggtactcccttatctgcttcaggagtaagcatactgaccaaagtgtatgggaactgtgcctcagttctctccttctcatgaggatgtgggccctgtgaggaccaaaactagaatcttgatgtggcgatgtttatcaatcacaatgtactcaatactggtatgagctcaacataggttttctgggtgatatttttcttcaatccaaaattctatttttacgatgcctgatgacactcactgcatgcattttatcactgaaccacttgggagaaaccaacggagttttctgtatcattttcttgactgctctctctgtcttcaacactagcaaatctgtggataggccccatgatagggtccctgggatttcggtcaagcaatgtataacactggttaggcaagaacgtgaaaatgttattttatatgttggtgtaaagtactttaaaccttaaactgtattggttgacacctagctttaatcgtgatgtagtttggcttttgtctgtccagaaaaaaaacagctgaggatgatattgatgcagcatccatgcagtaattaaaatttcagagccagacacctgtgagagatatttaaatatagcgggtattggagtaagcctcctttgttgtaccctcctatgccttgcctagctttacaatttgggtttcacttactctcttttggactgtatagtgctgccctacactgagataccacaggcagcattctcatctccatagcttcttctgataatgaagaataaccaaggcccaggctgtttagagcattgacctttggagcaaggccactgtcctagcttcagtgtgtggctctatggactgaggggccagctactttggagcatgtggagtgggtatgagaataaacaagcctgttgtccatggatcctggaaaagaagtgggagattgaagagggacaccaatcatgctctaaataattgaattttaaatgctgattttaaatgcttatactgtaatattttaaaggatagtcatttgggtctgaaaaatctgaaaatgaatattactgccttttaaccttcaaatagtttttctttcacttaagacaaagtgagtaaaatactttagaagtaaaaatcaatttttgcaataatttgtggttagattaaccacttagacaggcacttgttcagacttacaatctgcacatctcaaggagcctgaatattgtcagagcatattatgatgctatataaaacaaaatgtttatgacatagataacctttcttttctaactctaaatttcaaagtggacagaaacctagcccttcacagtcccgttctacagtcacatgcatagtgatttgatttatcaaaatgatgaagtgttggcaaaaaccaccctgatatgttctggagccttgatcttgctcgtccaggtcccagttgccataggtatgtctgcctgccttagtagccgtgtcctttttctcatcaagtttggattaaagtgttcaataattactgcagaccaaaagatgggaaactaaaatgaaaaaccctctagaaattgaagactcatttatgagtacaatgtattttagcatcttagacatatctttgtttcctttctttggcattagaaataattaagttcactaatatactatctttatttaaaatggatctgtgtgcgtactgtaccagtggttaaggtatcatgtaatagaaagggttaacttcttgtaaatctaaacaacaggggatggagagaaggctcagtgattactagcactggatgctgtcaaaaaggacccagtttggttcccagcgactacatggcaactcacaactacctgtcactccagttccagaggatctgatgccctcttctggcctccagcatcactgcatgcacatggtgcacagatatacatgcaggggaaacaccaatatatgtataagtacatttaaaaaaaaaatccgaacaatatagtttttttctgaagactttaaaagaaattctagcaatgtttgctaatgtaaacaatcattttatttaactggaaattatcggcaaagtaatgaacgggaggtctgtggtcagagtttagaggatcacttaattataaataaaatacagtaagaggctttattaaaccttaacagggcatcattgcatgatatttgacaaatggcaaaagaacacgtgctacatacacctcagtaaggtagccacacatcaccatatgtaatatacatttcagaaacgaaaaatgttctctgttttcaaagaactttggatgataaattaggacgatttattagaatgcctgcaaactacattacacagggagatgggagtaaggaatgatagaccaaaatgtgcccaaatgaaaataattggaaaactctttattcggagccatttacaaattactctgttaataataaaattgagcaatctaaacatttactttcagttccaaagccaaaattatcagactgccacactctttctaagagtttcctcacacacaataagtaaataaataagtataaaaataaaaataaagatagcgtgaacactaagcatttgtctatgacatcccttgctttcagcaaaaaaaaaaaaaaaaaatatatatatatatatatatatatatatatatatatatacatatatatatatattgaaggttttaaatgccactttccagtaccgatcagagatgtgcaatttaacagctggttgcatttctttaaacattaaaaatgtaagctcattacagcatttgctattcgaatcttcttaaaatttcagagtacatttgtagtttagattataaatgatcccaccaccaccaacagaggcttatggactaaaggcttggtcactagcctgtgtcactattccatttctggaaactctaggaggtagggtctatggggggtggggggtagaagtgacttggagtgtacctttgagaaaataatgaggcatgccctccagttttacaaggccaccagaatgtcccacttcatctcaggccccaaggcaacagagactgactgtgcactaaaacatgatgtaatgctctcatgtaagccatcctttatttctgttattttgccacagggaacagagtagcaaaggtggcagtcctggagatggcttccagtcttcttcagccataagaaattgtctctcatattggcattgtggaaactaggaatgtgtagactatgttttcaatcatgtgaagctattcttcacctgtctcttggcaagcttcatgtttagtctgtgaagtgaagaaaggcagttctttgtttggaagactcttctaatgggccattcctcaaaatcttccaaatacttacaataaatattttgccaggcagtggccagcaggtatttttttacactatcctgtgtatctgtgtaaatcaccgacaagactatgtgttttaaaaattaggctccaccagtgattgagtctgtgtctgtcattggtatgaaatacatatcactgagggctggagagatgtctcgtgggttaaaagtactttctttttttacagaggacctgggtttgattcccagcacccatgtagtagctcacaaccatctgtaactccagttcttgggggtcagatgccctcttctgactcacacagacatcaagcactcacccccctgcccagtgtatacacatgagtgcaggcaaaaactcatggacagaaaaaattaatctaacaaaacaaaacaaattaaaaaaaaaaactaacactaatagattgaaaatggaatatattaagaatgtacctgagtaaaacttttttagcaatttgataagtgcattcaaataagatttgggaagtgatccacatctgggctaaatgtattaacccagcattaattgcaatagtccagaaagtctcctaatatccggggttggggggggggggttgacatagagccatttaattgcaccatttcttaaataccagccattcttattttaaaattttgcaaactttagactactcacgcaagatttcttacaatactgtttaatacacaatagcatttaagtaagtatttattaaacatctcagaaatgttatttctgtgtagaaaaaagtgggactggagagatggctcagaggttaaaggagcactgactgatcttccagaagtcatgagttcaattcccagcaaccacagcaatgggatctgatgccctcttctggtttgaccggcggtccaggggttgggggataaaatatggagtgtaaataaattaatttttttttaaaaaggaaaaatgtacttctgtaggaaactgctcgtttcttcaagcccagctaaagggcagttgtaggttctgtgactagagaggagaaggtgtctgctttctcttccttctcgtaggtcttcctgcatgactacagcaagcagcccacctttgtgcaccctgttctggtgacagcactgaacttacaaagaacctaggacaatctcattttccggtcagatggctgtcactcgtcattctcgtttaccatgcggtgtgacataggcacgaggttttggaatatgtggaagtatgtatttgtgggaagggcatagaaagatcggatcaactgtatttgttcattttttgcctcctgtagatatttgtagacattcccttctgacctcaggagtctgatgaatagagagaagccattctgaaatattattattctcaggctagtgtcaatgtcttctctttattcttagtcttcagaagtttgactatcaaatagcctgatttttttcaacttcattctgtttaaaggcttcttgatttttcctaaaatgttgattttgtatctatcaccattttagaagactttaagacattattcaaatattgtgtttctaactgatttttctcccctgcctttctccctccttctcatcctctctcctttcctctcttctcccacccttatctttatctttctctctttctatatctatctcttctttcttgttctttgcccttgattttggttttgagaaaaggttttgtgatgtagccaaaactatcctggaatccgttaccctcctgcctctctccgctctctgtgaatgatgggatctcaggtaagcaccaggtctttctttcggagtcttctgacattgtcccgcatgaaggagaggttctaccatttaatcagcatttttccttcttcttcagattggatactaccagttcatctgcattcacgttgatttattcttccctggcacaccgtgctgttaagcccactcagtaatgttcttaaaccttagatattttagtttccagtttcttgcatctgatgaactttattgattatggtcatttttcttctttgctttcgtgaggcttgttaagactccatcattccaatgttatttagaatcctcatctggcaagtcccttctcagagccacccaggaactggtcactcagactgctcttgaactttctctttggccttttacaactatctgaagtaatttgggttttgcttctcaatttcaaaggcaatttttcaaaacctcagctcagttctgcatgcctgctttagcctctgtgtttgcagactctgctctgcacacaatcacagttccggatcccacacaaacaaggtcattgcttcttgcttctctcatttcctggctcatccttgtgcctgaatgctggcctctgtttctataggtcagaattgttctggttttcagactttcttcctctatgctgtagaacatccatggcctgttctcaggctgagagccatttcaaatatcattatcaatgacagaattaattaaagaaaggaaacacattgttctagtcattttactaactgatttttattaatttacagggttgtggttgggtttttttttttgtcggcttgtttgttgttgttattttgtttttctgttttgttttgtatagagtttcagtcctcacttttcaggagcaaagtgtggtctcatattctagttctagggtttccacaacatggtgcatagagagtgttttaaagaataataattattttttgaagagaattaaaaagtcccagatcacagtgtaggcatattttgtttcttatctgtcttttattccccctgagatgctcactcttcttggctgataggaggttcctcccctgagggacctgtcttagctctaatattacaatgcttcttttcacaatcttgcttctatagaggcccccgtctgactaattcaaggttcaggaatttagaactcacactcctgaaaccaggaggacccacaaggaggttcttcaggatatcactacaaacaaagatcttggacagaatgggactttcctctgcttctagttgagtctccagggatactgttcactgtatatgctgagccttgttactaatgaattcacattaatatgtaagataaatatgttcccaccgtcctaaactaccccatctacagaatcagttgcaatggtaatttctccttgagagaaaataccaacaccacaaatatgggcatcaccttggaaatatctgctttattcttaatagctgctgactgcatctgctgtgtttatcttcgtttcatctctggggtctgtcatgcactgaggtccctgccattgtttatagtgactcacagtttcactctgaggatagccatagccttcctagtgcctccatagctctcattccccattacatatataacacaccaacatgttacctgctggttttgttttgcctcccagttcactccattacaaggccaactacactgagatattttttcctgttttgttcattacaacatctacagtgtctagcatacatatttgttgaatcaatccaagcaagtgaccagaattctcttcttgttcttccttgactaaaatgactttgttagaaatgagtaactcagaaaaatatctcaacaaatgccaacacatgaattcttttcatggatcacaaatcatatgcacaaaaatacttttcaaacacatacggttctttatagtaatgatgttatttgggttttgttatgacaaacaagattttagactgaaactatttggacatctgatatactttagtattaagggatgaatggtatttgagatgcatatttggatactatgagcttataaaacagatattaactctacatccaaggctatgtgttctgtttaagagcattttctgacatctgcatttagtggctattcgtgtttctgggtaaaaacatctaacctttaaaatcactaaactcaggtaactctctgataagaaagaaattattattgacttctaaaaatagttttgagtctaattctctgttttatgaatacacaagagtataaggaaacaagtcacttagtcccaggtatcaaaccccaagttttgttctctacctaaagacaatgtggcaccagtccgttgccttcatgcctatgtatgggttcttgttcaatcagacctctctttgttcttcgaccccagacttagtcttctgtatcaacctaggaaaagaaaatatatacaaaacttagatgtacccaagagaagcagctgagaggaaaataaactcacaaagggcaacttaaaaataaagatgtttttttccagcttcctagtttaaaaataccacccttgttgagacttgtaatgattaaaaatagctcctaagtagagaagttgtgttttcctaagatcggttcatcagacatttgatgccaaagacttttaagaatcagcattcatatttcaacagcaatgtccctgcatccctcagtgtgaccccctccccatgtgtcaaccacttccttgaagactcaggaggcatttcattttgaactgcaataactcaaatacttcaagtctttggatgacatggagtagcccttgctctttgatgggccgccctggtatgaaacaagtggatattcaaatgagtgcttgtaaagttgatccatccataatattacaattcaaagtttcatttttaattaacttaaataaataacgcaacttgaaagtttagtagcgcaatggataagcccaggaaagctttctctcacctattctaatgcatcctagctacttttttcctcactcctaagttagctgatcttgaatgaaggagttcattttcacgcttggaatcctcatacactttggtctttagaaccctttgcgtccttggaggctcaagtgtagcccaagcattaatctgtgtaaaaccatggagaaatcaaggcaacctctaaactattcttcctttaatagagctacaagaaaatttgaaacacacacacagagagagagagagagagagagagagagagagagagagagagagagagagagagggagagggagagggggggggcactagcaaacaagcaaatgaaatacacacaactaaaggagaccaagaggaaagcttggaaaggaagaagtcaaagtatcattatttacagattattatgatactatacacaaatgactctaaagatgacataggatcttatattagtaggattcctaacacataccctgggtttgtcatatttatctgtaggacccacgttggaaggtatcctcttccctagccaaatttccagacacatttacaggttgggagagagaagagcagcttctaggagaggccagtctgtgtgaaaactagatgactttgcaacaggccaagttctctttatctgagctggcaaccagcctgtgttgtcgcaatccagggtgtaacagcatcctagtggtctagacggtgccaagaggaagcaatacctggctgaacatcgtgagccagcttttctaccaggctgtgagctaatacagcactatttgccagttgttctgcaattataatgtcccggtgggcatgaatctgatgacagaaaggaaagaggtgagctctttgcatccagtactgtgataagcacttagaatattattttattaataaaaaaattaaagtaagctatatttgtaatgtgcatttcaaagagcagcctttccgggtctggaggctgcattcttcagcatggcacctcattattttcctctgtaaatcaatgacgctaactcatttgctagcatccgatggacaactgagaaaatgcacctagaggaggaaggaagtgttggggtttacagcccaaagtaatatgtgttactttgcaagttttctttaggtctgcaggttagcagaggagatacacctgtctaatccggaaataaagtgtcagtcacagctttggcactattggcttatactggactgttacatccaggctaaggtgcctgggggaaaatgtcaacacatctccaagtcaagcctggacaagtacttcctgctctagaccacaaaagatttgcagattctttcaggaactgtctttgtcactcctctccgctatgacagaatgcatgatgagaacgacgtagggaaggatggttttgtttcggctcgcaggttgagtgtagagtctgccatcttggggaaggcacgttgcaggagtaggagactgctagccactctgcctttttaatcaggaagcagaggaagatgaaagttggtactcaacttgctttcacctttcatttagcccatgatcagagcacccacagaatgatgctatcatattcagagtgaccacccccccaaccgattaacccaattaaaaattccatcacaaacatgcccagatacttggattctagatactaccaaattgaccatcagtattaactatcctgggaactgatgtactttcagaaagaagaaataagtctcatatcacatgtatttatttattctttcttatatgtccttacttctttatctctgcccgataaacaagactatttgtggccatttactccaggtaatattaaacattgataaactaaagagtttctggttttgtgctcaagtccagcagagagaatcaattttaaaaactgcattacaagataatagataaggagctatataatagtgccagagcacatcagtttatcagatgaccaaccaaggaaatggagctagagaagggaattctggggcttagagaagcatttgtgccagtagggccgtcatgtggatcaggtaaaccagggactgggaagttctgcctccaggaccaacgcagaggctagccctggagaatgacacccaaggttagctcaggcaatggccttctggagtatttcagccttcactctagaagtaacaaaacacgttcagctttttacagtttcatattttaatttagttgtctgagtgtttgcctgcatgcatgtctgtgtatcacatgtgtgcagtgcccacaaatgccagaagagggtttagatcccctgtaactggagttatagatagtgataagcctggaaactgaacctgggacctctgtaagagtagccagtgctcttaattgctgagacatccctccatcccctgcacaaagcatgaacagtgttcaacagagaagattgcaggccaaagtgtgtggtttgaaagatcagttttgatgctttgtttagaagagtgaggatggtgagtgtggtgtggatgctgagaaatgggaaagcaaagggatgtaaactctagggaaagccatatcagatgaaattttgaatgtgtttgatcatgtggactgaagaagaggtgtttatggggggaaggcctctcctcctgcataacagataaaacagaactaaatgtaagaaatgagacctgcattccacagtcacattcaagagatagcattaatacactgtttcttaaaaaggggcaccagtgtagagcaacggcaaaatggctggtgtggtgtatctgacatcagtattggtgttatagtccccagttacaagaagtccctgctcttttcccataggctggaacgaaatagggacaatcttctatgctcccttagcatagctcccttcccagactcaccatattagtggtttagagtgcacatccttatctaatgaatctttttttattgaatattttctttatttacatttcagatgttatcccggtttccctccatcctggaaacagcctatcacattctccctccccctgtttctatgagggtgtttctccacccacctatccactcccacctccctgccctcaattcccctacactggggaatctattgagccttcataggacaaggacctctcctcccattaattcatgacaaggccatcctctgctacatatgcagctggagccatgtgtaatcctctgttgatgacttagtccctgggagttctggggtggggagggggtctggttggttgatattgctgttcttcctgtggggctgcaaacaccttcaactccttcagtcctttctctaactcctctattgcggaccctgtgctcagtccaatggctgtctgcgaacatctgcctctgtatttgtaaggctctggcagggcctctcaggagacagccatatcaggctgtcttgaatattttctttatttacatttcttggcatccacaatagtatcttggtttggtaactgtatataggataaatccctaaatgggacagtctctggatggcctttccttcagtctctgctcagcactttatctccatatttgctcctgtgagtgttttgttttccttctaagaaggactgaagcacccacactttggtcttccttcttcttgagcctcatgtggtctatgaattgtatcctggttatttggagctatctaatgaatcttaaagatgcttaagattgccacatctctgaagaaaattgcctcttcttccccagcaaccatcaagcggcaatagctcttcagataagggaggagcttcataacccctcccctttcacgctgtgattgtgcctgtccttgtacatactgtcacagctgctgtgagctcatgtgtgcagcggccctatcatgtcaagcaaacactgctttactgaaaacatttattacttctggttcttatggcctttctagcactcttccatgatgattcccaaaccttggaggatgggagtagatatagaccaaccactcagagttgagtctcttattctctggacagttgtgggcccctgttctaatagccatctactgtagaaagaaggttctggaatgatccctgacaattcactaacctactgtatgaagatgagggattaggggcagtttatgactatgtctgtttagaaaacagcggcactaggttcttccctctggcctgatcgtcagtgaaatttggctcggtcatgagttccatctaatgaagtaggttttaaattcaaccatgagatggttggttactgccaaagcatctgtgccactatttcaccagagaaatgtcttatttttattttttaacatcccatgactaaatatatggtgtcttcagcaatggtgttttagcatcaagttatagagggtaccaagagctatctcaattgccagtaaagtttagggttatctaatgagccctacctactaccttatcaaaatagggagtcagtacctgctagtactgataggccatgttacctgaggcgagtattattcccacattgtagagtaattgtatctacagtcttttatgtatatatgtattatatattccatatatgtatgtgtatgtatgtacatatatgtgtatatatatgtgtgtgtgtgtgtgtgtgtgtgtgtgtgtgtgtgtacatgtaagagaacatgtagcctttctttttctgagtctgggtaatgtcactcggggtgattatttctgccccatccatttactggtcatctcatcaggtttttttacaactgagtaatattcaatatatgtgtcactttttcttgcccagccatcagtgatggacatctaaactgttgctgtttcctggctattgaggattgagcagaaatgaacatgaatgagcaagcatctctgtaggagatgtaggcttttgggtggatgcccagttgtagtatagctggatcctgtggtagatctatttctagctcttctaggaacttagacttgatttttcccagtggcttcagcagtttgcacacccaccaacagtgagtaactattcccttccttaaacccacactagcacgtgttttctttttgaggggtgtgtggtcttagccattttgaattgggtaagatgaaattccaaagtaattttagttttcatttcctgatagctacagatgttgaacatttctaaagagcatttctcagccatttgtatttattcttttgagacctttctgttctgttccatgacctgtttttaattgggttgttttgtttataatattcctttgagtatttttctattatagaccctgggcacctgtcagcctatctatgtagctggtaaagattattttcccattcttttggctgtctcttttcttgaatgatagtgtcctttactgtacaaaagtgtcctttactgttttactttcaggaggtcccgtttgttatttgttgattttaatgcctttgctacttggagccatctccagaaagtcctttctgtgcccgtaagctgaagcttgtcccctgctttctcttctcatagcttaggggtatcaggttttataccgaggtctttcatacacttggaaatgattttgagctgggcgaaagatgctgtcttttctctaatgagtactttgatctccgtgggcttatatctgtgtcctccattctattatattaattagtaggtccacatccatgccaggagcacactgtttttattacaatagttctgttgtagaacgtgcagtgagagatggtactacttctggcagtgtttctatagttgatgattgttttggttatcctgggtcttctgttttcacgtaagctttcccagtagaactgccttcactgtgtcccctggagtttgctagtttgtgttttcatttttattcagtcctagctcttttaaatgtttttttcttgatctctttccaggccttcctggcttcgagtttctgtcacatcagcaggtattatcctgagaagtatcttcataagtgacttgacctttctgtcccgcagcttgcagcactttttctcctttctctgtgttagctgtcgtagattgtggggacttccttttctggtcctgtcctttgctgtcctgtggaccccttgtacctatataagcacctttttctctaagtttaggaatttttcgtctatgaaatcacagttcattgagaaatgtatattcgctgtacctccactatgacatttcgtcctttttctgtgttcataattcaaagattaggtccttttttcagcatcccaaagctctttaggttctgttcattttttttttaaatttctgatgggcttttattgagctgggacgtacagggttggaaggagatgcaggcttccttggcagtgtggaagaaagggagtcctgggacactacatggaactcctctttattttttatttgaagacagggtctcactaaactgcccatgctggctctgaactcattgtatgcccagacagaccttgcacttgagatccctcagcactgcaaatggctaggattacatgtgagccactgggcctgcctggttcatacattactttcattttctttacaaaataccaagtgaacctcagagggctggtggcaaacatgttttttctttctttggagggactgtgctggctgatgagaacacgaggtgtttgacagtgatttctgagactcataaaataagagaaagaaaagaaaaatgctgttggtaaaagtgcccgggctttgcaactgagtacctagtttttatttcctccctcagagcttgtgaaatcagtattgtttgtcttaggccttttattatctatgagtcatgtgactcatgcagctagctcttgctaagttgagactatatctgtgtgactctgacctcatctggggtcaatgtcaatcctatcttcctatagcacatcaatgatgtccccatcagcagtacattccataggcagacaacatctgatgcttctagttttgtgtccatagtaagcccaaccgggctcaatgggcatcattttcctgactgtaaattccaagacatgacaagttctgtagtagtttccacctgtaacctctaagggaagtgtcttagttggggttttactactgtgaacagacaccatgaccgagtcaactctcataaggacagcattcagttaggtctggcttacaagttcagtctattatcatcatagcaggaaagtagtgtcctggaaggcatggagcaagagttgctgagagttctacatcttcatctgaaggctgctagcagaatactggcttccaggcagctaggatgaaggtcttaaaagcccacacccacagtgacaaacctacttcaacaaggccacacctgattcaacagggccataccttccaatagtgtcatcccctggattgtgcatgtagaaaccatcacaggagagaccatttggtgattctctcgtggattttcatttgagaacatccctgtgcttggaacacccagctcaggtatcttcagggttagaagcagatttcttgggtttctttctctttcaggaaatgaaagtggatgaagaatctgtaaggtgtttgtaaatctgagagcccagttttttgagatatttgctaataaggccacatcttgtggcttccctcctgactcaggaatgaattcatcatgagatgccccttccaggctacaaaaacccatttggcagaacctctcttagactcaaccaatgacacaacacgctggaggcagaacagaacagacagcctttcttccctatagctagcagctagctcatcttaacaaaatggaaagcagactgaatccctgcccaccaactgagacagaaccactggctaacaacagaaactgttgactgagtgtttattgggtgaatgacaatgtaaatgcgtgtggtctggctttatttcttagggtaagctgtctctaaagagcatcctaacacagaaggctgtcaccagacactcagttcttaagttttacagatcccacatctcttattctcctagctcaaccaaggagttaggttcctgcagtatgcagcactgggggtggaggaaaagataccagggctattaaaagaaagtgcctactctgtccttccttggaaggaaggaagagcagccagggaaatgggcacacttactatcttttggaatgagctgttcatcaacaccgaacttcctctctgtgttcagaactaagctgcctacacacagactcattttgaaattccacaagacagtcatcatcctctggattgtgaaacccttgcactgtgctgtaaaatgaaggagctactcgttcctaggatggttgtgtacttgatgtacagtctgtccaccctgaggagtgctctaagttcataaaatacacacattatttcaaaatctcagaacaaaaaggagaagagagagaaggggagaaggtcaaatatttataccctaaaataaataaacaaataaaatctaccatttaattccactagtcttgttctcctttgagatattggtgtttaagtcaagtgctgacagtctcactgggaggcagaggctggagagttgtgagttcaaagccatcttgtgctatattgtgagccttgtctcaaacagagtaaatttattaatgaattaattaactgtctaaaacaagaataatgtcaatggcccaaaatatgtttcttgaagcgtcaaggttctgtgctgaggcaatcaaatataagtattttattaggaaaagtaataaagctaacattttgaggctcagtacatggaaagaaaggcaggaagttactctgtaattctctcaaatcatgtgactctttaagtgtgctttttcacattttacagagatactcacaccttgaaccaggcacagaacttgaagagttctacatcttcatctgaaggatgctagcagaatactggcttccaggcagctaagaggagggtcttaaagcccacacccacagtgacacacctattctaacaagaccgaccatacctactccaacagggccacaccttttaatagtgtcactccctgggctgaacatatacaaaccatcacagtaccaaaagctaatcacctcttagctgatgggtgtttcaaatcctcaagtaaaaaatgaatctgtcttaacactcagccttttgaggtcaatcctgccctaccttgctctgaaccacctcaactatgattccttcccccatctgtgtctggtactttgttcccttataccaccctacactggaaacatttctccaggtacaggaggacatatcttctttgagacgattagcgtgtgtagacatggtgggagcttgctgtggtaaaaatatagtgagactactacctcagcgatgtgaagccacaaagaatgtgtttgctgtgtgctatgtgaacgaccctccttcaacctgccgaggcagtgtgcttgaattgttgtttacctgaataaaagaaaaagaagagttcttttgcctcttgcaggactgctgtcattttcactttcaattaatggatacacagtttctgggagttagggcttttaactagcatgtgtaatgtagtttcttaactcctaggatgaggtatgaaaaccttgccatggtgtttgaatcaccttaggatcaagtaatgaggtatccaaaagacatcgggactatagataatagtgttactgaatctgagagaagggcaatgttctatcttcagctttaaacaggtttgtgtgtgtgtgtgtgtggtaatgtaaacttatcctaacaagaacataggcaaatattttgactgcacctctcatctgtatgatacaccaaaccctgcattgtaaatgtttggaggggtgagatagtcactaatagttggcaataatgcatccgtgtgacaggaaacagggaggttctgcttgctctcaagtggacttttcactgcccgagaatttggcaagaaatgctgggcctctctgacccccctctggattttcctctccttccaccaaatgtccagatgtgaggagagagcgagtctgtgcatttgcagtcccctccagtgctaccaagattacactgactgctgagctgtgaaagccctttttaggcgttttgttttgatttgttttgttttgttttgttttgttttgttttgttttgttttgttttgttttgttttgaagagacagagttgtatgttgaaaggagtggatgctggcatgaattatagggacaggctgtcttttctcacttcctctttcccattagcaatagtcagagtctgagatagctggacacgaaagcttagcttgtggaatcacaatttgttcgactctgaaacctagatcggggacatttacacatgggtgtaatttctttttctttcttttttatttttttattattattattatttttatgtactagactcattgatggatgaactggaactaaggctctacatatcagcccttcctcctgccccaacacacaaccacctgattttgctttaccaagaggccaaaatacacataagagaaaagacagcacctctaacaaatggtgctggccaagctagacactggcaggtagaaaatgaactaacttcttctctcacccagaacaaaacgcagctccaaaaggtacaaggacagcagcatcggacctgataccctgaacctgatagatgagaaggaaaacaatctttctgaacatgacctcaatgccacaggcattaaaaccaacaatttaataattgagacctcaataaactaaaaaaacttacagtaggggatgccatcattcaagtaaggaggcagcatacagagtgggaaaaaattctgcagactctatgagacacaaataacaacaacaacaaaatacaggcaagcacttgggatcaaacaaaacagaattcttatcatttcttgtaagtaaagtaaaaaagacaaagaatcagctgtaatttgcatgaattcgcccacctaataatcaggcccttcggagctaggataaccagctcttgggtggtagcttccagtatggagggatccagagcctttggattgcttcccaccatgctaactgacgcgtgatgggaagcctggcaagaagagacgaggtggagtggacatgctgctcacatggggaaagtcagtggaaattaaactttctggacattagccttgttttaggttttgccttgggtgttgtgatcagattttatacgcataactcctatacattatgcccattttgtggtatttgtttacttaacttattgtagtgtcgagaattgaacttaaggtccatgggtgctagacaagcactctactacttagtattatgctcagcccttggtttcatgagacagggtctcaaaatgtagcccaggatagacaagaactcactacatatcctaagctaaccttgaacttttgagtctcctgcttcttcctccaaggactggaattatagtgcatcacggttttttgtttgtttgttcctttgcgtgtgtttgtgtgtgtgtgtgtgtgtgtgtgtgtgtgtgtgtgtgtacatgtgtgtgtgtgtgtgtgttatttaaaggcaaccagtataaatgttttggacataatcccaaatttatgttacattcttccaaagtagtgattaagtttgaagacctgtgtactgagtattgactgtttcatgataaaaaaagagctttgggcttaaagctgcctgcataccctctgtggtgcttattcatgagaatgtgaaaggacaaaacatttgtggctatatttaaagtgtctgtattttatatgattagcgagaattagccaacctctagagatgaaaaattatgaaaataatttcatttcttatatatgcattgaataccaatgtgctttgcataaaaatccaatattgctcttttcttttcaaggcactaacatagttaatacctttatattaaaagaaaaaggttatttattcctggtttgtctttccaattatattttccattatgtatacatagttctgtgtgtgtaaagcaacaggagaaagggaaggataccattagtatggtctgctaaagcaacttcaggagggtttaagaagaatttagaagctaataggattagatgtgaaataactaattttctgggcttagatttcaaggaaccctgatgtcaaattttgatattatcccaagatgagatgaactccagtgtgcatcagactgaaacaaggagatgagaacggaggatagttaggaggttgctttgacaagtgcccttgtctgcttcctgtagccatgataaacaccataaccaaaagcacacggggaggaagggggttgtttcatcttgtagctgaaataagtctgggaggagctgaaggcaggagcctggactcaggaaatgaagcagaggccatagaggatgctgcttgctgccttgctcatccttgatgagccttggtttgcttggctttcatttcatacaacctagagccaaggccctctcacattaaccattagccaagaaaatggccccacagaccaatcttgtggaacatttatcaaccaactcacctcattacagatgaccctagcttgtgtccaaatgacaaaaacctagccagaatgatatgctaaacaacagattagttgcctcatggcctcagcagatacaatcaggcttattttaaatagcgtattattagagtagaattgtcaactgatgagccgcacatacctgagtagaacatttggtaagtcttttagtgtaagaacatcatcatggttaaatgtgaacacagccaccattcttagaaccttccttttgttctttagtgatcgcaccaccactcaggcaactgcagatctgatttctgttgtttcagattactgtgaactttctagtgtttttataaataggattttcactcagcataactttgttttgagacagtctcactatgtgggcctcgctgacctagaacttactgtgtagagaaagctgcccttcaactgacagagctctgtctgactctgccaacttagtgctgagagtaatgatttgggccagcacacataaccaacacaactgcatttttaagaaccaatctctatctatctatctatctatctatctatctatctatctatctataatcaattaattaacctttctccagaaccatagcttgtgttcaactaacaaaacctaaccagcggggtacctgtggcaccagaagataaggacagacttatttttaatagcatattattatagtaaaattggcatatatattcatgcttacaagacttctttcttctgttgaagagtaattagcatttgtggacataacatattttgcttccatggatcaatggacactcttatcgtgtcattcttataaatgaaacaattactttatttttatggcagtgtttgcatggatcatttttctgtgactttgtggtgaaagttagaatgacttcaatacccatagtatatatttatttaaaaattaaggctcttcactattttccaaggttaacagttcatatctactgggcaatgtgtgaaagttcttgtgccatcaaatcccccccatcctgttagtctgtgcattggttgcttctttgtttctgtgataaaacaccacgatcagggcaacttatttctataatgaactcttctgcagagtagatcttggcttatggtgccagagggttagagtccacaaagatgggaacagaatggcagcaggcagtgggcagtgggcagcggacagcgggcagtgggcagcaggaagtaggaagcaggagctggcagctgggagctcacatctcaaccaggaacatgaaacagagtgagaagggagggagggatggaaggaaggagaagtaatggcatcagtgcctgtcccaatggcatacttccttcagcaaaggccacacctcctatacctgtgcaaacagcaccaccaacaggagacctagtgttcaatggccagagcctatgggtgacatttattattcaccactacagtctgtttcatgtgttttagctttgcaagtcgctggtatctcccaaggctaagcaccatttgccctctgcatgtcttctgatgatgctcaagcaagccttgaacttgatccaggtgtttcctgctttctttctgttgtgtttaggttaaatagtacatagctgaggggaggtttagcttcacaacagtgcttttttgacattgtgtgagtttacggctcatgcctcatcagtatagatagtttgccagtaatcaatgtaatgtgcacatttaaataagaagtatatgcttaaaggtacagttctgaaccagattagccttccatacctctcatttcaaaccaccaaaattaatatttctccaactcttttgcacgatagccctacttctaatgcaaaacaaggagttctttgcttgatatctcacctgtgtaggcagtgaaatattttatgccagttacaataggcaaatctcctgaaagctcttaaaaagatttaactatagctgccgaaagatatggggtagttttagacttataactgttttagcattaacacttataattgtagattatggtgaaataataaaacagaaaatgacagagacaggaaagatgggggggcgggggaattcaacatttagtagaagaaaaagactgtgagctacagtctgcctctgcagaatcatctcaatttatcaaaaccatgagtgtctagaagctggagaatggcttggtggttaaggacactgtccactcttgccctcccccccccaaaatcagttcccagcacccacatcgtggctcacagctatctataactccattccaggggatctgacaccctcttctggcctccatggcactgcacacatgtaatgtacatgcatgcaggtgaagcattcatatataaataataataaaaagatccttgttttaaaagaatatggtttgaagttacttattacaggtaattaagtgtttctagagttattggggttttacaaatggttcatggagttgatatatattgggagcatatgaaatagtagctgcaatataaactataatgtcaagactatgtatcagacaacgatcagaaaatgtataattatgaatgctacagcctggtattttagcaactcagctctagtgctaaagaacacatccttatttggaaacaggattggtgtgcatgagccattggaaggtgaggtcactggcctcctcgttcctgtgtttctacgactggtacccttagatgaaagggtagtcggtgcaaagtgaggcacccgagaaactatgttgtgacaacacgggcagagactggaatgaggtccctgaatgtcaaggaatgccaagaattgacagccacgtagcagacagcaggaggaggcaaggggaagattgtgatcattggaatctagatgtcagactgtgagcctcaagagccaggacaaagaactgggagtcatttaatgcccatttaatggactcttataggacagcatttaagaaaacaatacaataaaaaaaagtacattttaacaaaataacaccgagtacacagtgattcagcctatgcaaatttttatttaaaaaaaaaaacaaaaacaaaaacaaatttgccagtacctgaggccagagagctagcagtaaagttcctttctgtattggcagtcttctggtccagggatccaagctgccagtgactaacattctaggctctgtgttgtctctgtatagcaggtcgtgattgccctggagtggccctgatgtaagccgtgcaatccagagcttaagcaagtggagctggtgttcattacaggtggaagtcctgaactgattaagaaaaaggaaattatgtatctatcattttaagaatatgatttggatcatcaaaaagaaacaaaaacaagtaaaagaaagtggtgagactgtagtcagtacccagttacagcagggagctgaagagatgcattgaccaggactgagctgtcctgtagatgcttagactgcaaacacagggacagtcaggagaaaatgactgaacagtgatgaaaaagccttatccccattcaaaggcacgttgccccttattctctgcttcctggaagtgataccaagagtggctgtcctgatcatcatgtgcagttttgttcccatatcccctttgtggctgtcctagtgagagcagacagatctctctaggtgccagttactacatgaaccatgctgtctccaaaacacattagttcttgtgtgttggagacgaaggtggtttcattccaacttcagtgagcagacagctgagtagtgtaatgattagtgatgacttttcccatgatagccaagatagttttcaaagctaggcactgtcaacagccagaacttcaatgaagggagacacatcatagactgtattagccagggtcctctagaggaacagaagatgagccatgaatatatattaaaagccaaattattagattgccttatcagagtagtccaacaatagttgtctcacactaaagaggccaagaatccagtagttgctcaatccagaaggctgcgtgctttgatagacccgatttggtaccaaaaacctctggaagattcctggccttcagtctatgttagaagtctatgtttttcatttggttggtttgttggcttggtttggttggttggttttggttgttttgagaaacacagggtttctctgtgttgtcctggctgtccagtaacttactctgtagaccagacaggccttgaattcagagatcctccaccctctgcctcatgaaagctggaagtaatggtgtgtgccaccactgctaggctgaaaaagctgtttctaataccagggagtggatcagtagtgacagcaagagagtaaatggactctccggtgtaagtgaagaccaagcctatgcaacagtgaatagtgtgccttttgccatgtcctttcacatgtacccctactaaaagatgctagctatatttgagctattcttcccacatataataaaacaatcaagatgaccacccacagcattgcctgctgagccaacctgatatttaaagactggatcattgaggccactccccatgagattctagactttgtcaagttgctagttaaaactaagggtcactggaagtttgattctaagattaaacttagtgtctgcttaggtaaggcatactgtagtgcatgcctttaatcttagctgttagaagatagacacaggtatttatctgtgagttcaaggccagcctggtctatatatcagggtctgaaccagttagggatacatagagagaccctgtctcaaaagtttgtccatagattttaaatacacatagcccattattgtttagattggcagaaaagtatttatactctgtgaactagactaattgtggaagaaaagagtggagttggtcctcttattacaatggtgtacataacttaatcttctcaggcattggaagaataccatataatccagctttttcactctgtgcatatacccagataactcaacttcctaacataagacatttttgcatccccatgtttattgctgtttattcactataataaagaattggaatcaacctagttgtcaatcaatagatgaatggataaagaactgatatatgtacacacacacatatacacacaacacacacaaatatatgaatgacacgtatgtgttgtatatatatgcatacacacacacacaacacacatacgtatgaatgttattcaactctaaagaaaaatgtaaatcacaaagtcttcagaaaaatggatggactttgagtgtatagtattaagtgagatcacacaatttcagaaagaaagacccttcatattctccctcactgcagaatctgtcaatagtatatgtatgtgtgagaacaaatgtgatgtgggtccagtataactcaagaaaggctaagtattggagatgaagaggacagaatagagaggtgcacaggagttataaaagggaagagaaagctaattgcttttctatgtttaactctgtcccatatttctcattctcggtggtggggaagtgcataaaatacataagataatgagaagctacatagttcccactcgggtggctgttctaactgcatacaagtttattgaaatttatagacattggcctgattgatgttagtgtgtgttatttttatttccacatttttcataataccgtttttttaaagaattaggaagcctaactattatgtggagatatgaatggcaggaaacagaacaaacagaacatcagttatatccttttgtgtaataagaattaatacatgcttagagtacatggatgcccacctgcccatggtccttgccctgatgcagatagaagcaaaatttagtctttggctccagtggagatgaaaacaccctttctgtatatggttcatctctgtgggactcgtttgctcatcagtgactagagactcaatacctgactgtagaccatacctcacactatttccccctagcactgtcctgattattcaacacatgaaaaaacactcgggcctggttccatcaataaccaagaagttccttcctctccatgtctgtttattttttaaaactttaagcagcatcatagaattagttcctattttcacaaattatttcagttgtttacttgtgccttcaaatgggccttggtgaatggctatggagactttaccaactgctcccctttgtaattttcaaagagctgccattaactagtgattgtagtttctggccacttagttggacttgctttctaggttcaatgtatttgttccataggtgtttatctgtttacttgttgcgtgcttggttgagacagggtctcactgtgcagatcagggtagccccaaacacttcgtttttctgtttccatttccctagagctgggattacaggcatgaagcaccatgcttgcccgtatcaagttctatcgtgtaatgtattcagtgctgagctcgtgccacctccatttaaagactgcctggcatttacagcctcctgttactactcactacccttgcagatcagtttctacactgaatttgaacatagactcaggagtattttaagaaatttaattgtgtgcttgcctgaccaacacgttaggtagagatgagttatcatccctcactgacatcagcgtggtaccctagggataggacatctgaaagccccaccctgaaagactaatttatcatgcatgttcaaggaaagtgattaggaaacctggtgaccattttgacaattctttgcactcagtggggccagatggcttgttgacagtggaagaccaagtcttaagggtctcagttagttttcccgatcattcttaagactgtttgtgttgttttctcagatatggtaaaagatttataggtgttggattttttttttaatttcaagaaagctcctacaaacaatttgcaaattagttactggcaaactagttattctatggctattattcttgagctattactattattataatagatgtgatatttctcatagaaatctttttctactaattattccctttatgatatactaattacaattgggttataaaattctctttctcactcacaaagatcaagagtgggtattttttataattactagaatgtatatttacattaaattctaactagtctcaaaacatttattctatacactagaactatgaatagcttcattaggcatcagataaattaaatcagtgtttctgaactgttaacattaacaggattcatgcaatatttagtgttcctcaccaggtctaatgttagatctgacacactgtgtcactgatgtgcttctagttaatgactgtgtcaccggccacagccacggctgcacgtagcaaggacatggactcaggagttccctgaagaaatttttcacatagatgctaagagatagtgacagattccctttccactgtatgtctgttaagtccacagtaagttacagactaactagcccagggattttttttccttgtcgttttcagtacggtctttcctaaacagaagccaagggacattctccagccagtgtgaatctgtcagaagcctgcctgctatttcagacttaacttgctgccttgaatctcccatgatggttttatgttcatgctgcgttcctgatgcaacatctcccctgctttctggatctctctgtttcagaaggtcatgcgaagttatctataacaggacccattttcaatacacattgagttcccagaaatggacttactagttccgaaagactgtggtctctctctctctccctcttacatagctagggtctgacagacagcgctggctttaattaggaaacagcacagggaaatggtgctttgattaatagagcaaatagatataatcagccacgtgatctgaattcaggccgggagactgactggaggaattgtctttgttgtggatacaactgtagctctctttgggaaacagtcaaccagcgttgaaggccactggcagctttgaagggatataaatggctgatataatagaaaaggtttttcatctagggataacataatttgggagaacgctctgtgttcagagagccctgaaaccctgttatcaacattataaaacacatttttgaaaacaaacaaaacaaaaaccttggtggaaggtcttaaaccaggcagaatggttgcctctagaatagacatattttgtagtgtaaatttggggtatgagggttgggaagctgaaaatatgaagggagggtgaattctaaatcaatcacatccctggtacatcaagtttctacaggattaggcacatcctttcccactgaggccagataaggcagtccactgcatacatacatgccaggggactaagtgcagcccatgtatgggagctcccaggggttcagattagttgataccattggtcttcctatgtggtcgccatccccttctgtttcttaatctttaccctaaattttcgaaaggggtccccaacctctgtcccatgcttggctgtgataatctgtagctatctcagacagctgctggtagagcctctcagaggatagccatggcaggctcttgtctgcaattacaacatagcatcagtaatagtgttagggattggtgcccacctgtaggatggatcccaagttgggctggtcagtgctccattcagccactccttcagtctctgctccatttttgtctctgcatttcttttagacaggagcaattttgggttgaaagttttgtaggtgggttgatgtccctgtctctccactgagggtcctgtctgggtactggaggtggtctcttcaggttctatgtccccactgttaggcattttggctaaagtcacctacattgagtcctgggaggctctcattcttgttgaacttctttgagatctgaggggtgtgtcatggatagtctaaacttttttggctaatatccacttatcagtgagcacacaccatgcatgtccttggggactgggttacctcaattaggatgatattttctaattccatccatttccctgcgaatttcatgaagtcattgtttttaatacttgaatactattctattatgtaaataaaccatattttctgtatccattcttcagttgagggacatctgggttgtttccagtttctggctattgagaataaggctgctatctatgaacatagtggagcatgtgtccttctggtatggtggaacatcttttgagtatatagctgggtcttcaggtagaactatttccaattttctgagaagttaccagatgatttccaaagttattgaacaagtttgcaatctcaccagtgtggaggagtgttcttctttatccacaacttcgccatcatgtgctgtcacttgagttcttgatcttaggcattctgattggtgtaacgtggaatatgagtcctcttgatttgcatctccctgacaacaaaggacagtgaacattcctttaagtgtttcttggccattcaagattcctctgttgaaaattctcagtttagctctgaaccccattttaaaattagtttttttgggggggcgttcttttgcagtctaactttttgagtagccactctactatctaataaaatagactttcaatgaaaagtaatcaaaagagatggcgaaggacacttcatattcgtcaaaggaaaaaatccaccaagatgaagtctccattctgaacacctatgccccaaatgcaagagcacccacattcataaaagaaactttactaaagttcaaaacactcactgaacctcacacaattattttgggggacttcaacatccaactctcactaatggacaggtcatggaaacagaaactaaacacaaacacagtgaaactaacatatgaaccaaatggatttaacagatatctgaagaacatttcaccccaaatcttgataatatatcttcttctcagcacctcatggaaccttctccaaaaatgaccatataactggacacaaaacaggcctcaacagcgacaagaagactgaaataatcatgtgcatcctatcagatcaccatcaactaaggctagacttcaataacaacaaaacaacagaaaactcatgaaaactgaacaactctctactcaatgataacgtggttagggaagaaataaagaaattaagaactttctagaattcaatgaaaatgaagccacaatatacccaaacttatagaacacaatgaaagcagtgttaagaggaaaattcatagcactaagtgccttcataaagaaattggagatatctgatactagcaatttaacagtacaactgaaagctctagaaaaaacaaagaaacaaacatacccaggaggagtagacagcagaaaatagtcaaacacagggctaaaatcaaccaattacaaacaaagaaaacaaaacaaagaatcaagaactggtttttttgagaaaatcaacaagatagacaaactcttactctaactaaaaggcacagagacaatatccaaattaacaaaattataaataaagagggagacataaaaacaaaaactgaggaaatttaaaaagtcatcaggtcttacttcaaaaagctatactcaacataactggaaaaatctaaacaaaatggataatttaagtagttttaagtatactttttgttttattcttctcttcatttttttctctatgctttgggatttttactattttgtgtagttgtttttatttcatctatgttggatcatgatttctttgtaaaaattaaattagagtgagttattgtcacagtcattaaaaccctgtgtctcagtggctgtataatactcaaaggatacagcttttgaaatgacttaaaggttattgggtgcagattatgaagaatttaaaattaattttcagtgattcgtctatgaatgcatgggatcactgttagtttgaatgttgagagttctctttgtgtaggggttggccagggcctgatccacagacctgtagtgaaaatccacttcccaaagtccaggtggctgcaggaaacagtggctcccccatttctgcccccaggaagacagtagagaaacccaggccgtagacccccaacttcatgtgaacaatgctctggggtctggccagggcttccctggatggacctgtagtttagtcaaagagagagtcagttctctaaaagagtcctttacagggcgttggagaaagctgagcaagggacaagaagtagaaaaagactcagagaagaagtacgcgatcaaggagggaagggaggcaggagacaaaatggagaggaaaaagaggatgagatcatttagtttagcaattaaaagtttaaaataatagcccactcagtttggctatttttctacttatacctatatttttgtgaaaattttcacaatttcaaattttgacagctgaataatattccattatgtaaatccaccaggttttccttatccaaccattgtccatatccataaggatatcaaggctgttttctaatttctggcgattatgaacaaagcagcaatgaacacgcatgagtaagttctctgtgataacatacagagccctggacccccaaaagacaaatacttgttttctcttatatgtggatgtcagcttctagcttttgatttctgtgttacaatccaaatgaccacagacattaggtactgggtaaggggttgaggctgtagaggattcattagaaaggagaagcagaattgagtgctatggaaagatgaagacagaactaggtaggagggacatagaggatgaggggagggtaaagaagaaacaaggccctttgaaaagccatgtggacacctactactgcagaaccttcctagattatagacacatacaaaaggaatataaacagagtagagtcactgaaaatagaagagacaatgccccagctagacatcatatcctaccaagtaaatcttcagtgctagatgtaggttagatcttatttaattccagcacctacacggcagctcacaagtgtctgttattcaagctgtaggggatccaataccctcttctggcttctgtacacatcaggtagacgtgtggtgcacttacatacatgtaggcatacatataaaataaacaagcaaatcttaaacgctgtaccttgaataagggcacctgtgtttaagacttggcccctagcttgtttctgttggaaggggattctcggggtcctcatgtgataccttggggaatcaaagcagatcataggacattcaccctcttccaccattatctgtgacactgctgtcagtctaaggaaaggtggccaatttgatgatggcctaaaaaaattctaaaactgtaatggtggggtctccctgcctcacatgacttgagtcaggagatagggttgtgaccatgatgacatatctctaaacctttcttccattttcccagagtgtataaaatgtgttgttctccacataaatctcttgattggtctgtttatacatgaaatctgatgaggtcacagccattcatagtcatgtttttctataatcagtgggttcagttatagtcatatttttctatctccagtggcttgggttctgttaagagcttttttaagcaggctggagagatgactccggggttgagggttcttttgagctgactgctctagttctagaggatcagactacatcttctgtcttccacggtcaccaagcacaggcatggtgcacgtacatgcatgtaggcaaacataagtaaaatgaataaaatttttttaaaaaattcagcaaaaataaattttaatctgagttataattccttgagaacattttgtcataggaaatgaaataaatgttagaccatttgtatgtgaagtgcccttgggaagaatactgtgtagcagatggggctctagaagcagcagaacttcttagggtcccctgtgcatttgtggcaaactctgtctatgtatcaggactctgctctcactttcaaaagtctggctctggccagaaaacaagagaaagtctagattctttgatataaattcaaacattcctttctacagagtcttacagttgcttaaattagtaacaataaaaaacaaattgccctcctgactcttgcttggaggaaatgctttgatttatctgtatttacttaagcctgtatcataaaattttgatttatttcacgtctctctgcccactcctatatgctttgattagtaagtgtccagaacaagaagaccaactcccattcatctaatccacatgactggacacctcggatactggatgtctcaatccatccatcattccattgcctctttttcttcccaaggaagcatcctttcccatcacccagcgattgattgtttgcacaccatctgaaaagcggcagggccaagtcttaccaggtccatacaacagagagacaaggaagaagactagggaatgtggagaagggtgagaagaactatgaagggacaagtgtctggtttgcacgcagagaaagctattttctgacgtcagcagaatccttctcaagggtcttaagtgttggcctcatgcagaattacaccgccattcttcacacccactgcgcactttaccaccagtgtaggctggaactcccctgctgtgtcttatcttgaatggctttcttctctccgaaagtcatccttgaccaagtggaactccattcatgtgacactgaggtgtcagtcacagtgaaaaaaaaaacttgtgtgtaggaaatttggacagcacatttcaacactccatcttgatctgaaatgttggataattatagccatttcttataactcttctttcctcctcatttaagaggagaaagcagtatatatatgttacactttaggcatgttattggggtaatatgtttgtgaaatagcttgtatataataattgattagtatatatgataatatactcagtaatgtttctaataaactcagctatgacaatgatcattagcttgtttatagtactatattcttacttttctattaaccagacccaattgaatatatatttgtttttatgagagagaaacccatgcatgtgtacatatgatggaaaatgttaagtgaagaactaaaatgtgatgtgaacattttcacttcctatcctgtgtgtataagtttcttaaatatttggtcattttttttaggtagtgtatcctctgtgtgttgagtaggtttttgtttttgtttttgttttttttgttttgtttttttttttttttttttttgtcagcttggcagggacatagacacagcctggaagagggaatgtcaaattgagtggggcctccattatgttggtttgtgggaatgtctgttgggcattttctaaattgctaatttagcccagcctgctatgagcatgaactctgggctggaggccttgggctttgtaagaaagatagatgagaagtcaataaatagcattactccacagtctctgcttgaattaccaccccccaggttcctgccttggcttcttacataatggacggtcacctgcaagctaaataaatcatttcctccccaaattgcgtttgtggtcagtgtttgatcacaacaactaagacatgttgtgtattcttattccttccctctgcctccattgccagtgtagggtctccattttgactctatttaagcctaagcacacagcactgtgccgtgagtgcagtaagtgcccattatatggtctttgttagaatggcttcatgtgttttatttttactctaagatcaggtgaaccacagcttgtgtctttaaattctaatacttcattaccaaagaataaattgtttgtttaaatttgattttaatatgaaattggaaaaaaatattcaagtgtgtcattatcttttcttaaaactatgcggtaagggataaagatgtctctgagttcttcctgatgaactgaggtcattacatataataggaacctaattttccttctccattcctcctagtttgttgctcagcccaactgccagcagctgctcgcttcccgctggtacgatgagttcccaggctggaggagaagacactgggcggtgaagatggtgacgtgtttcataataggactactcttccccgtcttctccgtgtgctacctgatagctcccaaaagcccacttggactgttcatcagaaagccatttatcaagtttatctgccacacagcctcctatctgacctttttgtttctgctgctgctagcctctcagcacatcgacaggtcagacttgaacaggcaaggtccaccaccaaccatcgtggagtggatgatattaccgtgggtcctgggtaaatgtgttactctagaaaatataataacgaacgtgtctctgccgtggaattttgttgcttagaaagaatcttcactaatgtttggggcagagggagagattacacacaggttctgcccatggtagctctaagacctcatctttcaaatcaaacaaatgtttttccaattgtgttgtgcttgttcccaaatgcaatgcaggaaaggtaatttaggttacaggttacaaggagttgatgaccctttgtcccataagtgactcagggtttgtgccttgcttgtcttttgaatcttttggatgtgtcccattggccacatataatctcttatttttctcctgtcctggcatctgatcccagagcctttatgggggcaaagaggtggtctctgtcactgactgaaccagacctgcaccccttagttttcttatatgccttccacatagaagtatgagtatctcaagaacttctgattctatgtatgtagttcatcgattgtctttctcagaaaattctgtagctagagaaataggaaattaaacaataggaaaagatttaacctccacttaccagagatagataattattttagaactgctacaatcagagtagaaaaccttatttattaacaactgtgtttttgcttcctttctgttactgtagctatccttagaatttgcattttaattatcctttactgtattctactgtggtttgctgagtaagcatattttttcagttttacttgaattccccttggtctcagatccagttcattagagaacatgactcatttcatgattcctaatctcaggagatctgcttgggttaacttcaaaactgagaggagtctagcatgaggatcagcggggagaaaggtgacctgccttcagtcctaggccttagtataagtggtagcaaagaacagtatagtgatgtgaagttggtgttgtaactatgttttataaataccatctcaagtgagctttagagtcagtcctgactaacctgaagtacatgcatatataaagtaaaagggaaatttagatctgtaattcctcaaagaaacattacggcaaggaagttgatagcaagatgaaattatcactgtcagtcaaagtatctcacataagggacatattttatgttaattttcttcagagagaaactttctggagtaactcttactaaagcatttaaaaggccgtatgttatgcactgacaactcacactacatgtctgaaagccctgacatcccaaatggaacgtgcagcttttttaggaaaaccttccaggtgcggcatgctgtgagcataaatagtattgctcgccttcatgccatcagtgagtatactgaataccttcaaagagtcaagactgggaccattacatagcaagcaaaaggcctttgggctgatggactttaaatctcactggagggagtaggtagtgaattaatgatcagaattgcagaaaatggtaaatattataaaaaataaaaacatctaattttgaagttaaaaccacctttgattacctgctatgtattaaacttgtagcagaatattccttgacaagtggatgaaagaaatgatgtcagagacactaggtaattcgtgtgtagtcttaaatgtattataattccaaaaagctgaagtatttgctagaggtaacattttcaggataatataaccagaggggtaaaattgatccaaaagcttttagagtgaaaagatgtattttaaaagataaaagagtatgtgagtgattatcaacagggcacgtgatacgtgtttatgtatcaggtagatctctcaagagagttatattggtgaatcttgagagcctccttgctaaggctgagtttgcggggctttagaggacccagaattgcaagggctgtgagcacttactggcatgctatggatatactttactatggacttaaaacataggcagtcacaaaccctcagggcttttggtaccttcatcaataaaggaaaaggcttttcactgaatgacacttgatcccccattgagtctacagagctgccctccttagggagagagaattgttgttctcaaaagggaacagaagatggcattaggacaggagtgctgagagctttttatgaacatgtgatctagattaaaggggtgtggtctgatttggtggctgcatcagtgaaacattcatatctttttgcccaaggctgataggtgatgaagtaagacatctttagtttcatttcctgtgtggttctagatgtttaacaataaagtagaatgacgtggagctggagagatgactccatgattgagagagcactggctactcctgcagcggtccatggttctgcccagcaccaacctagctgctcagctcacaaccatctgtaactccagttctaaggggggtaggctcttctggacaatgcaggatacatacatacatacatacatacatacatacatacatacatgtgtgtgtgtgcaattaaacatatggaggcaaacacttaatgcacataaaatataattaaagaaaagaaaggattccttgggaatactagttttcagaccttcccaaaaaccagtttgagtttttcttcaggatccattataactaaattataataggtaaaaaatattccatagtttttcatatagcacaaaagtaaacacacacatgtacatatacatatgcgtatatacacttatataatcaacttagcaaaagcttgcaaaattaataacatatctttttcataaaagtagcacttcagtaaaggctgtcatatattaaatactgccttgctcccgagagaaggtaaaatggctgctgaagtgattggcgttaagtcatgcctaagaatatgccacagtcagacagcatgcaaatctgtgctctgtgagcacaacgagaagggtgaagtgaggagatgatggagcagagaacagaatctcagcttggttaaaaatagcgcctggagaattgctagccacaaagcaagacgtgcccataatatccacattacccagcttgcctggatcgcaggctgctttagcaatttttctttagcaacattggcttctcatttccctcatttactgtatattatataagttaaaacattgaagttaagaagtctgaaaatgttcaactaagtctgccaaacaggtaacatggatttcataatgttgatcttattttcatcttgacactcataggaaccaacaaacatcttcctgggaccaatatatatatatgtgtgtgtgtgtgtgtgtgtgtgtgtgtgtgtgtgtgtgtataatttttattcttgtgatatatatttgtgtgtgtgtatatatatatatattatatattatgtatatataaaattttagtctggtgaccatttttgttttccccatttttagggggtgctacagagtaaactcagagtctcctgcatgttaaacatgtgttctacccctgagtcatacatcagtgctcccttttacaaatcatcactaagatcatgtgtcttcaatgactcataatctcagccttacttctaaagcacctagcctcttgatcagctcgaaatggtgttacaatgataagaaactagcatatagctttcttccactcctccccaggtcacaatgctcaacagatgagctatagtcatgtaaagatccaaacacagtggcaaaagagccacttggtattttaaagaactattgtaatatcaagcaagcaagcaaacaaacaaaaactagacaaccattacagcatgacacatttttcttattttcctgtttatctctatgtgctggtgggactatttaaaagctacttgtatacagttatacccagtaaactatcaggatacacaatatttagaaatatttaaattgttgtctgttcacctgctgatttgcagtaactgaattctttactggggaaaaatgacccctgtcaggttatgacagcacatgtcaaatttaacacccaaagactgatccctagagaccttctgagaatattggtacctagtgtagatgggaaggggacacatactgaaaagcaaactagacatcaaaacataaaaaaggttaaatggttggatggtgcttaaattggttttccttagttagaaatcactataataaatgtagttgcatgacattgatgctaaagaggctgaaaatttcaatgcacattctgctgcggatgtcacagcaactctactccatctggctatattaaaccgagggaatggcttgttttccagagaggagacagggttcggaagttggattccttgtccagaatcaaagggccagcaggtgcttgttaatacaacaaatcccagagcctccaaagaaagaaccgtgtttctctatgagacactgcgccagaaatgagagagataggatttcaggaagcaggaagtttctagaacaccatctctgcacacatgtgcaccactccctgcctcctcgcacctttccacaggtacaatgcgactgagcagtgcatgtagtttattagaggtgcaacacactccaggatgcacactggtcaggaataacaagcatcacattttacacactaaatcctccgcaccaccccacagctctgctgccgtcctctccctcatcgctcccactggcttagaacaaaataagcaatgtcttggaggaaggaaaggagggagggaggaaagatggaaggagagaaggaagggaggggaggatggagaaggaagagagatgaaagggagaaagaaaatgagagcaaggagaggagggagggagggagggagggagggagggagggagggagggagggagggagggagggagggagggagaggaaatacctgtaaacatgcttactttctagtttggaagaatcagtttctggggcatacagttaagttccctcaactgtaagaacattcttaatatttaagcctctgttgagagatacgcacatgtgaagggtgtttcggtcaattgtttttttaaagagaattcattttaagtggaatgtggtaatctttatagtgaaaatacacacatttgaaaagtgtacactatgcagcttctactggtccttgacaaggcagctggagcgaagaaacctttgttgttttcccatcaatttaaatattcggctgtaatttccatagaagcgttgaaatgaaaggagatcctatgaaaaatgctatctctcaaactttttaattaattattaaataattatatttaggtacgaactaccagaaccaagttgtatattcttacctgacatggcacctcttcttcccaaactgaaactgtgggcgtccttatttttgttttcctaaatttttatctctaatgctaaaatagtggacaaactcacggcgactcaagggtttttcaaatgtcttcaaatgcagagtaattgtccccatttgcattacatcagcctctcttgatggtctgctgactccagtcagaagcgctgtgaattattttcagtaaattgagattttaagttgtcctcttgcttagttgattcagaaattgcagaggtacttgaacacactcaagaaagagaaacaattatggaaaaaaagatctcataccagactccgttctcatatgacaattatgaaacactactccccagaatctagatgcaaagtaggcttcctttttccagacactctactcagcccacctaaattagagagcctgactatttttgaatgagatcactcttagatataggcttcctgaaacattaagttattaagatgtaagaccagcttgttttcttgttaacattttcctaaatatgtgagaattgcatacagtgtgttttcttcagattctcttctatgccttgcactactcctctcagcttcacccccatctccccatagatccatccccacctcccaaactcacaactttgtatcttcttattttaacaagccatctagtcccatttgggcagaccatgtactcctcctggcatggatccatccactagaacgtggccaacctaccaggagccacatccttcataaaaaattgactttatcccctcccagagccatcaagtattcctagctctctagttaggggatggggctcttgctctaccctccttatactagagtgctgataggattggtctcgtgcaagtcttgtgcagacaaccacagctgccatgagtttgtgagcacagaagtcctgtcatgtccaaaagacactgttttctctggttaggatggtctttcctccccctttctattgtggtccctgagccttaggaagaggaatggtgaggatgccctaaattatggctaacaactccactggtattctgtgcgctttgagcaatttgtgactttctgtgtaaaccactatacaacggtgattctctgataagatctaagagcatcaccagtgtgtcggtatagagatatggatttgggggtcagattgatattgtgtccaattatcagaataacagtagtagtagatcctcagaacagtagcagatccaccctcggggcctgtgaactcccaagtctggtttacagtacaggtttgggtttcctccagtagagtgggccttctattcaagcagcaaaggactgggtctattttaaaatttttaaacttataagcactttaaagatttttctcttcttaatgaaagactggcccatgacctgaaagacctggatatgttcatctacattatgtctcacgcgttgactccagccccagggtacacagatctctgcttttctccattcctgctgccttagggaagacagctgacagacagcagaagttgggtcttcattaaccaaccagcacccaggccaaagctcttcccagatgtcctgctttctgggaatcactaagtatccgtgtcaggaatgaatatggtgacattcctgggatgtgctgcactattgtgcccaagcactagaaagttctcaggatcagattcagctctgtctaaaaccttacagtccctcaaccactgtgtaccctgcagttagttagtctctgtggtcttctacgatcctcacaagtcttgagtttggcaagaagagtcatgcacagcttttcctgcaccatgcatggacttaacaaacagacacacagaacggtaagcgttcaggctgccagcagctgccccattgacaaactgcctggttttcccttttccatgttgaaccagaccaagggagaggtataccagttagctgttgagaagatgccttcacagggagtgtggactactagtttcttcttgctgtataatcctcaggcttcagggcttttcttggcatcccctcatttgaattaaggaagcattgaggggtagtcactctcatccctctctgatatttaactcctccataaaggagcaaaaactgtagtcagaacaatgtggctttcttattatctcctcttccagtgtttctctttgtggagtgtggcaagggaggaccaagtgtgggatagcagaaagtatcctcagatcggtcagcagcctaccaacaggaggtcatctatagcttcctgcaaactgccttcagaaagggagtttggcaggctttcatcttccactccactgaggttttaaatatatcccagcaccctaggagctgcccttaacttgatgtctcttgggggatctggtatcacgatactctccattaagtaaaataacttctagtaatacaatgatttttgacagagacaggcttctgagcccagagacacgtttcaattcccccattcgaaaagcaaagggaacttccagccatgaggaattctttgtgttctttttatctttgctgatttgatgtctcacggtgcagctacagtgtaactctgtcttcagtaaaggggctatagaggtcagcctcgacagctctgggtcttgaacaagcccttgggggttactctggtgaaaaggtgtcctgctctttgtttggggctgctgattactatttgtgtaatagccacagcaagagaaggcaaggccaaggatccctcccagtgatgctgtttataccccaaagcctgaaatctggactgacagatgagagtaaaatcagagacggtcttctcccttacatcctcacaaccatgttcagaatgctcaagcattcctgagtgaacagccctgggagaggttaaaaaaaaaagaaagaaagaaacaaataacaaaaaggacaaacatccagacccccagagcacgtttgaaagtgacttccgggacccattccccttgggctctttccatcccgggtgcagactcttgacttcaaggcctgtaacaaggtttctaccacaggcctgagaaattgtgtcatctgtatataaatacacacagacagacacagagagagagagagaacgcaatgttgaaatgttccattgtgggaacaggacaaacacattgtgacagaagttccctgaagctttgttctctcctgtttttttcccatttccgtgaacagttaactctctggatgcatctcagtttgtactagcaccttctcggttttttaatggcttgcttgttcaaaaatgcggtggctgttgccagaagagataaaacttggcatttcactaacatgcttacagcagactaaaagtcaacagccatcaagcaggtgtgtgatgaggaagacatttacgaggtgatactccaacctggggtttgaaaagtaaaaagcattccagggctgaagagatagatgtgcagaggttaggaacactggatggccttgcagaggacccaggttcagttctggaaacccagatggtggtttataactgcttctctcaccacctgtcaaggggctttctctgcccttcggcatcaatgccctgattgctgtgcaagtcctttaagatctcttacatttgataataatacatacaaactcaaatgacggaatcgcaaatgcatgaagagaagctgacctagtgcacctctctagagaaatacatggactgggttgccatactttgccactgaaaggcatgctagactcaaagggtagaatgtctgttttcgtcagttttagagcaacacaacttgcagagaattcttcacgtttggccagaagctatcttttcattcttagcctgtcaaagatctatctggtttactctttctggggcagatcaagtctgggtctatttgtggatgacagatcttaatctaatgtcagctattttaacaactaaacgctgcagtagtatcagtggtaagaaacaatacttgtaaatcttttgcagttgtggtagaatcttttaattgaaaggcattgtactggctagttttgtgtcaacttgacacaggctggagttatcacagagaaaggagcttcagttgaggaaatgcctccatgagatccagctgtggggcattttatcaattagtgatcaagggagaaaggccccttgtgggtgggaacatctctgggctggtagtcttgagttctataagagagcaggctgagcaagccagtggaagcaagccagtaaagaacatccctccatggcctctgcatcagctcctgcttcctgacctgcttgagttccagtcctgacttccttggtgatgaacagcagtatggaagtgtaagctgaataaaccctttcctccctgtactggctggttttgtgtgtcaacttgacacagctagagttatcacagagaaaggaacttcagttgaggaaatgcctccatgagatccaactgtaaggcatttcctcaattagtgatcaagggggaaaggccccttgtgggtgggaccatctctgggctggtagtcttggttctataagagagcaggctgagtaagccaggggaagcaagccagtaaagaacatccgtccatggcctctgcatcagctcctgctttctgacctgcttcagttccagtcctgacttcctttggtgatgaacagcactatggaagtgtaagctgaataaaccctttcctccccatcttgcttcttggtcatgatgtttgtgcaggaatagaaaccctgactaagacactccccaacttgcttcttggtcatgatgtttgtgcaggaatagaaaccctgactaacacagtcatagaaccccagtgttgcctggtacccatctgactgatataacagttctcatctctctgtattctactgaaagctaatggaaaacacacagccaatcaatggtttcaaatgcatatcttctgagctctggggattggcacaattttacatacaacaaaataaatagtgagcattgaatgatctgccctgtaagaaattgttgccctggccattgcatttggagactcaaatccaaccctcatgtccccattaactagtaacctagctgtacggcacactgattctttgtgctgtgtctttctagtgtatactggacataggctggacttcaagaacctgccactgtatcatgaaaaaataccttcagtatgcaaaaggagagtgttgtcacatgttccaattgcttttcttcattatatgaaataaattctaggtttcctaccagttctgaaatccagtgtatgaatcatatcttattcagttctgtgtttatcctttttttttttttttcaaaatgtcagctatgatcccacccctcaggggatcactttatgtagaaagtctcagagggtaatctagttaggatgttagtgctaacattgggagcaggagggcattgttgttccaactcagagtcacagtgggggcctctgggtgagttccacggtttgaggtctgtggtgctggccttcactctatggctgtcagactttgcagggacagtttcctgatcccctcccagccataatctatgacactgggtgaccttatatcctgacacccaggactatgtcttacttcttctttgggttacgtaaacagtttgttccttatatgagagatgactggaccaggtctgtgccttgcccacacaaagaaccattgcagttccaggtccctaatttaatctccctttgagtcagagtgggaggcatggagtagaatgcagagggtctcagtttctcctgtcttctaccttatttttgaggcaggggcttcacacttcagatgagctggcctgtgagcttctcagtaatccatctctgactctcatcttgccatggcttccctgggatcacagacacattctatcacatcacagcacttacatagattacaggaactaaactcaccatctagctcaaaaggcgaacacttttatgcgctaagccatctccctggccccgtgttcttgttctttcaggagactggaagagtggcaagcttctctatggatctgacagctcttcatttcttacatgtcttatgaggatgtgacaagttatgatatttatagttaatctgactttttcttgcatttagtaaaaagcaattataatcttttcaacttcctgtattctcagctgctatcaaatgtggtactttacatgtggcatttcaggataccattattatacatgagtcgcatttattttgatgaatgcagttgtaataaatgaatttatctctttaatatttcatagtgtgagatcacttgaaagctctcattaggctctaaaaatagttgctcattactttaataagattatgggaataaaatagtgacctatataaatactttataaatattcctgagaattatacaatgtaatattttctactagaaaaggaaagagaaagggctagaaagatggctcagcagttaagagcactgactgctcttccagaggactggggttcaattcctgagacccacatggcaacccacacctgtctgtaacttcagctatagggcttctgacaccctcatacagagacatgcaggtaaaacaacaatcaacataaagcaataaataataaattctatatttaaaaaactggttatgtaaaagaagaatttctattgaccctggatgtgggactgaggttattgtcctctatgtggttctcagtaaattggcagggatgctgtaagcatgcattctcacagattgatagttgacctctcaaagcaccagcatagagaatcaaagttagattctttgatcatttaataaatgttcactttatttttatttcagataaactattcttccatccatttttaagttatttgacttaggagaaaaatataatccaaaacatgcttgtaagaacattctaagacattcctaaagaagaatacgtcgttacagagaaattaaaaacggaaacttttttaaagactttactattattttatcttatttggatatggattttgtgtgcacatgtgtaaatatcccatgtcctggaagtgccttctgagtccagaagtggatggtggatcccctgcaactagagaaagaatttttgaggttttatgggtgtagcttctgacattaccaggagacacaggctcacagcaaagcccttgatcctttggatcttagaatctttctgcccctcttctacaatattccctgagccttggtgctgggacgttttgtaactatatcaattgggactgggatccacaactctgcattttgattggttatggctttctgtcatgggctccatgtgttgtgaagagaagtttccttgatggtgggtgaagactcaactgatgtgtgggcataagggcaaatgagctaaacaagcatgatacccatagatatgctaaagtagatgtggaaagcccacggggcccctacacagccacaagcaattaaggactgctgggaatgggggaagcaatcttacagagggaagaaccaccgattgtccaacaccaaataaccagtcctgaaaacacacatacaagtaacattgtacacctatatgtatatttatataacaataactaatgaataaagagattatgagtttgaaagagcaaagagggatatatgaaaaggtttgggtagagaaaaggaaagaataaactatataaatagaattataatctcaaatagaaaaaaataaaacaaaacaggggagtgggcctaggtagactgttttagccaccaggtggattctcttacaagaatgttcttgctgatttacctccacagccccaaacattataacttttaaattaatgtatcaaatgaataaataaattaattaataatgagctaacaaaatcttctagaattagcttagtgtcctctgtcgtaagagatgtttgagactcagtattcttacctataaaagagttactgtgtctaacatatacagtccatggcttctctatctgtgattactttgttgcatatagcctttgtcagtgaaagtcactagattgaaagtcccacttacggtgaatttctctataattgcaggttttatatggggagagattaaacagatgtgggatggcggactccaggattacatccatgactggtggaatctaatggactttgtgatgaactccttgtatctggcaacaatctccttgaagattgtcgcgtttgtaaaggtaattttcctttacttagttaatgatgcatacatatgtctaattcttaagagcacatcttcagttgctattaatttttattaatagatccttatgtatggtatgtatcagcttcttattttatttatagggctgaaatacagaaacaatggatgtcctagaattgctgttataagcacatcaaagctgccaccatattgtctgtctgctaattaacatgactgcctcgaaatgaaacagtcccttaactctagtaataactaattctaaagaaattcttcaaacaccacttaattttaaacaacccacaaaacgatttttacaagatgtaacaaacagacacgttttcatgggcaaatcaaaatattacccttcaaaagcattgatatgattatttcaacttgctctaacagtttagtgtgattagaacagaacagaatttctttgtctttgtcctgttcatcaagatactgtctgtctgaaatctcacacaccccacaggaggtgcaccaggcctcagcacagctacataatttacataaagtatttagttctgcaatgacagctgagattttcatacttttgagagacttgtttcaaactaaagtatgatattttgcctttgcctacttttattttgtctcttcctttttgtctcctttaaaacacaatttgttacaaaaatgattagtgaattgatttaggaagaataaagaatagattctgattggttgccacatgaataatacatgcaatttatcatctaaaacaaaaaaataaaaatagcatacgtgagaattcctatgcactcagtgtacctctaaacaatgttcttattctccttgaatattcatgtgtcgtaggaacaaagctgcccaaatttggggaccttacagtttctagctattgttcaattaaaatgttgccagtattcaacaaaatactgaagaaacactatttctatcagtcttatgaaaaacaaatctgtcatctttttgttattgtttgggattgtaaaaataaaatcgttatcaacatcacactatacaaatgtatggaatgcagtattatattttgttattttaacatatgtctagaatatatactgattagatcagggtaattactatttacatctttatcatttctatttagagcaggcaatccttctcttcacatatatattatgtgtgtatgatgtgtctgtttatttagcattatagtagttctaagagttgagccttcaatacaggatcagacaatttgtactttggaacccattattaatctcccccagctccttttctctctatttttctcctactcttcctctttctcctcctccttctctttgtcttcaataatttacttatatattcattttacattcaggttgcagccttcctccttccctcccaatcctatccacaaatccctctccccaattattcccagtgaacgggaagcacccctggagtaccaccctgccctaggacatcaagtcccaacaggactaagtgcgtcctctcccactaaggcctgaccagctaggggaagaagatccaaaggcaacagagtcagagacagcccccgcttcaattattaaggtactcacatgaagaccaggctgcacatctgctacaaatgtgtaggtggcctaggtccagcccctgaatgcttttttgttggtgtttcgggctctgtgagcccccatggtcccaggatagctgactctgaaggtcttcctctgatgtccttgacccttctcactcgctcaatcctgtccctcaactcttccacaagactctctgagttctgcctgatatttggctgtgagtctctgcatctgtttccatctgctcctctcaggagacagttatgctaggcttctgtctgcaagcatagctgagtaccattaatagtgttaggggtggactctctcacatggaatgggtcttaagctgggccagtcattggttggctgtcccctcaatttctgttccgtctttatctctttctgccttgtaagcaggaccaattttgggttgaaggttttgtgagtgggttggtgtctccctccctccagtcttttcttagttttaaatttaagggttgcttttttgagaatttcatgcatgcttattgtattcgcatcatatctaccccttctctctcttttccaacacttcctgtgcctccctattctgcaaattcatgatctcttctttaattactattgttacatatatcaattgcccctactgttttctagccacctttgatgtccactggtcccctgtgctgaccttcgagactcatgcttgacctctacatatatgcgagaatagagtgtaacagacttctgtgtctggcttatttcacttagcagaaatctctggtgccatcatgtttctttaaaaacatgattttacttaatggttaacatcgccttttgcatgtgctgcattttatctgtctatccattctccaattagtaagtcaattaattggctctgctattgcctgctgtagacagtgctgccataagaaaccaggtatctctttgacattatttctcattttcattagttatttgagaattttgttcaatgtattttgatcctattcataacttcccctagtgctttccagatctaccctacttccctcccaatacaactttgtgtcctctctttctcctaatatgtgctgctcatacactcataggtgaatgcccttccactttaacataactgaccaatcagagactacaaccttaaagacaactggctctccctctttcagcagctattgatagccagtagctcctcagttagttagtattttatgcccacctcccctctccatggtgggatttgtctggcttgagcttgctttctgcatgttgtcacaaacactgtgagttcataggtacaaatgacctgctgtgtctgaaagacgctgtttcatcatatcgataccaccagcccttgctctcacaatcattctgggttgcacaatgattcttggtccttggggaggaggagtgtgatatagaagtttccatctagggccaagaattccagtcattctctataccttctgggcctctgtgttaatttctatctactgcaaagggggccttctctcatgagagctgagatacacattaatctatgggtgtaataaaaatgtatcaggaatcagcttaacaaatatattggtttgatattttgatagcatttcttattctaaaaatgatctgaatctttatggcactctgtttttggttttgtgaggatccttagatattgttctacctaatggaagtactggtttacactcccagttttaagagtccaacagttttaagagtctccttttgtctacgtatttatcacagattgttatgttttgacctatttaataataactcacctgatttgaagaaatggcatcttgttttgtttttgatttacattgactggactttatttcaggtgctcattggccatttgggtttcatcttctgagaaatgtctactcaagtcatttacccactttagaaattgagttacttggttttgttgctaagttttgtagtttaaggaagacactttgaaaactgaatcaacaaaagatttttgaaatacaatgaccataaaacacacttcaattctcactcacatcatgctgatgctccttctgatacaggtattttttatatataagaacccaagtattcattatgtgcatttccatagcggagttgagccttcatatgagggaaggggatgggaagagaggtggggatggagggacagagacagagagggagaggggagaggacacgacactaatctcctttgaggacatgctcccagtataaacctttataaacctcatctcacacagactttgtaatcccccaatattaccacaagctgttggtcatttgaggaacattgaagatccacatgacagcacagcccttgaaaccaagattgtacatagtataactatgactagtatattacgccacttgtactgtttgaagcaagctacttaatattccaaatcctttttccaaaaaaacagtaataatcatcaaagttaatagaatgttttaaagatgcaaggagctaatagaaacattaaatatttgctttgactttgtttaatgttctagtctggctcctgtcactgtgagaaacacaaaacaaaaacaaatgcaacttgtggaggaaagggtttatttcctcttgtggttcatagcccatcatggaaggaagttcaggcagatacctggaggcaggaacagacacagaaaccatgcaggagtgctgcttactggcttgctctctaaaacttgttcaaattgttttcttatacaacccaggacacagaggtgcacagaggtggcaggacccacagtggactgcaccgccccatatcagtcattaaggaaaaatatgccccacagatgggcctcgggcgatctaatggaggagatccttcaactgatatttgcctattccctgacgactttcactgtgtcaagttgacataaactaaccagcgtgtatatacaaagtaacagcattacaagcactcgtcactttcctctgtactgatgaggtcttgatggtgcttcctttcatgctctgattctttttatacctcataggatggctggttttttttaaaacacagagcttgttgacctccaagacacaaattttaatcttattttcacttcactgggactggcttgttcctacttaaaaatagggttaaaacccactgcatttcctatgcaacatttgtctctcatgtttagcatcagtcatttgataggtataattaaatctctcttaactcttgactgtataacttaaatactttccaatattcaaagttactatgaatatgaacaattgtttttacagccgtggtagagtttttacattattttgataaacagttctggctgtacgacttcattccctatcagctaatgggggacaaagaatgctgcccctgcattgtgaaggatgtcagcccctcaaacagtattgtctgtgacatctttcagtttcacagcagggctctgtgggtagctgaagcctagttgttctagaattatctgttagtaaagaaatccttatgtctttctcttgtcttttttttctattttatttgcatatgtttacaaagaacatttttcatctttgcactggctggttttgtgtgtcaacttgacacaagctggagttatcacagagacaggagcttcagttggggaaatgcctccatgagatccagctgtgggatattttctcaattagtgatcaaggaggaagggccccttgtaggtgggaccatccctgggctggtagtcttgggttctataagagaacaggctgagcaagccagtggaagcaagccagtaagtaacatccctccatggcctctgcatcagctcctgtttccttacctgcttgaattccagtcctgacttcctttggtgatgaacagcagtgtggaagtataagctgaataaaccctttcctccccaacttgcttcttggtcattgatgtttgtgcaggaatagaaaccttgactaagaccatcttgtaaaatattcattaaaattaatacatgattttttccctgtaatctcctatgacaaatgtgctagttagatttcattactatatcaaatacctgagacaatcaacttataaaaagaaaaggtctttggctcacagtttgagggtcacttggcacttctgtaatatgttgggaaatgcaggatggagcaagcaagtgacctataagtggaaaaaatggaacaaagaagggaccaggatcccctcattcaagggcgtctccctaaatgatacagccacctctgaaaggtttgtcatctccaattaacaccaggctggagtcatggtctatcaaatgagccttaggaggacattctggatcaacagccattttcatattacatccacctgaaagttttactcctgttgattgacagtttagcttttttgaatatgcatgaacttgtaaagggcatgaagatgaactagcatatgtttctacagtctaggaacttataacccaatattatgatccaatccatcatcagctcttaacagcctgccaagacttcatgacttgggtctgatatatgtaggctcttcttccttttctcaaaccctcagctatatccagaagcccacatttctacagctgattaacattctgcgtcacccgtgtccttaaacatatcttactcttctcgtgttatattagagcttcagttgtgaagaaattcagaggacagtgctccttcaggagacactaggaactacatagcacatggctaacttcatatctacaaaaagaggagttctcttagaaaaattacatttttcagcaagggaggctataaggaaaataacaccacagtaggagtagagtgaaacacagttacttgatggggtggggaaatgtgtatgattatcttagacaggtgggaggtgtttattctacaacactgggctaccatcttgagcctttggaattctgatgttcacttatctctttttaaaagaacaatggacattgtttgattaatgtctgtatcataactgcctaattctgtggcttggtggtttctcctttcgtcattaatgagcaccttaaagacagaatttaaccatctttcggtatccatcataggtctcatagataagtcacagatgaaaagtcagaattggagaatttacactaattgtcaggactaagcatttatggaatagcattttggtgagaatgtagcaaaactgaaaatctaggagaatcacaagtactgtatgtatgtccagggcatcaagtaccaagctactgacaaatggatgcaaggtacaagctttgtctgtcagcctttaaggactcaaaacatcaaatccagaaaatgaagtcaaggagaatattaatacctagcatggccaatttttcctttaaaggataatgtagcaatgaataaatgagatttgatacaaggaaaagcagttaggacagtcattatgtcactgtgataatggaggaacgcggggaaattgttatgagattgagagatatgagggggtgcttgctattggatgctgggaaactgagtatgccatcatctcgattccggaggcgtaaaccaagggatcaaaagatgatagagttgagagttgggtttctgtctgtacatttgaagtttcgaaatagaaagaatcatcctgccagcagagtatgaaatgggatgagagggtgggaagtttgagctagacctgaagtctgagttgggggttagccctgggaggtatctggggagaactggtgaatgagaagagactggaaaagcaagcttatcattaaagggcaggtgagacagaggctcctccgggggttgagtttaaaatacacaacataactaattttattttatttttaaaactttatttgtaaatttacttcatacattagcactgtatattatttctaccttctttgcctttattccaattcctcctgtactctcaaaatcataacctcttctttagtgatttttgtctcacacacacacaacacatacacaacacacacacactcacataaacaccctgctgagtccatttactggtgctcatatgtacgtgtacatagggcttaccacttgggattggataacctatcagggcagctccctggagaagactgattctccctgtctcagcagccattggctggctgcttgtagctcttcttctaggggtgggaccttgagagattttcctcatccacattggtaggtcagctggtgttttcattgtatgggtctcgtttaggtgaccaggtggaatgaggtatcatgggtgcagcttctctgtcgtgtacagaagacactgtctcaaagaggtatcgtggtcttctgacacttacagtctttacactctattttctaagatgtttccagagccttggatataggtgtcttttctttagtgattctatttatttgttaaattcttctcctatcttgaattgtcattatattcatctgttggtatttgcagtctttatggagtcatctattcatatcctctttcagatccttgaacatactcataattgctattttggagttcttgtcttgagattgagctagacttatttcttggagcatgttggcataggggtgctgcctgtgggtgcaagcatactgtcctgggtattggcacttgtgttttgtgctgggatctagtcatctgcagttatgatgcttgtagtgttctcactgtagatatctggtctcacctttaatgggtgtgtgtacagttctttggtttctattacccaaccctgacaggttgtggaccagaagaatgatggcttattttttagtgttaggaccactctgggtcttggggctcagtctctgattgctccaagatctgaaattctggctagaagtctagtttcagattctaagcagtactggtgggtacaatataaacaatgggtaagttatatggcagactagagttggggaaggggctgactctggaggtctcttaagtgactttggtcttgtcttagtcagtattatactgctgtaaggagataccatgaccccagaaactcataaaaaggaaaacaattcattgagacattgcttggagtgttagagatttagtcctttatcatcatggtgagaagcatggcagcacacaggcagacatggtactggagaagaagctgagagctacattctaatctgcttggctggctgagagagaaagagagactctgggcctcactttggcttctggaaccccagagtccaccccaagtgacacacttcctctacaaggccacacatcccaatccctttaaatattgttattccctggtgaccaagcattaaaatttatgaacccatgaaggccattttcattcaaaccaccaccgatcttcctccacaaagggagacagaggcagggtagagacactctggggctgcctatgaatggcaacccatctgaaggggatggagggggttgggaggaggctggagtaagaggtccttagaaagaacagagtgggtgaagaaaagaggaacactggtggcctatctgggtcctagcaaaaggtggcacctgtagggtccctgcaggttgttggggagttacaaaacaatggaggtggtcttggaggagtgactgaggtgggtgtcgaggaaggactaggggaatcctggatccacaccaccaggaagctgaggctcaaggggatgatggtggtgggctagaaggaagaactggaaccaagaataaaatttcaagttaacgagttaatacccaacaataggtttagaaaatatgtccactggcccaatactttattctctctagatttaaagaacactgtggttcgcaaagctttttaaattgctttgatataattgcttatttactcactttttctgtttgctttttgctttgagacaggctcactgtgcagccccaggttaaccgtgacctcaccaaagagcttaggctgccctccctccaactcgcaacccactccctgagtcttgggcacggattgcaggtgtgcactgccacacctatttggaagcctaagaccatgtgtatgtgtacggcaggaggagattttaaagcaaaacttcaaagaatgagttcaagtgctaattgcttacagtttatgtctttgtttgttctctgacaggaagcaaggtgtctggatcatcaaacagacaatgattgatttacattgtgatcttagcatcagtccccatgtccaaattccccagtgggggatgtgatgagagccagatgtgcccagtgcacaaggggattataccacaggaaaggaaatcggaaattatgattctcagaatttacaggatgcagctgagctagctgccggacttccccctggggagagaaagacttcaaattattaagaaaataaatattctcaggagaacaaggtccctgggtttattatccagaaaatggaagtagatggctcctggggagatatctgtgagtctcccaggagccgttgtgacttttaatggtagtttgccattacaacaccattaatcccagtaatatggctcaaaaaggcctgactgtgtgtagctgtgtaactgtgatgatgcctgcatagtgtcattccataaaagctaccagacatgctggactctgagtccagtgtggattcttgtattagggcaaagatagagccttgttcgtgctttcgaagattatccattgtaattctttcagtcacagccaagatcattcactaaggatggttctgtgtatatcagttcctgggtagaaatagactctgttatagtatgatggtggcttctgcatcaggtcacctccaactggtgcaaaactgcaaatgaggcataaccttgactcttgactctgaacgctttgacagcacagagacccaatccattcttgccttttgccctctattcttgcagtacctcatgttaatccccttaaaggtttctgttagttagttagatgtatctgtctgtgtcctggtctatgagtatgttaagcaagagtcgaaaagttgaacctgatcagttgaataagcggaggtgtgttctttgtacaaagacagaaactatgaggtagcagacaagaactaattgattctcatgtcaaagttttaacacactgacaaaaactaaataagaaggacaggcctatacagccacatgaattaaagctcacgagttataaattaatgggcttctttctgtctttgtatggcttactctagctgctgccatcttaaagcatacaccttccagagagtggctgaggtggaccctagagagctctgcagagctgaatttgattctgtcagcatgtgtgcttactttgccttcatttctgtttcttcagtacagtgctctgaacccacgggaatcatgggacatgtggcaccccaccctggtggcagaggcattatttgctattgcaaacatcttcagttccctccgcctgatctctctgttcactgccaattctcacctggggcctctgcagatatctctgggaaggatgcttctggacatcctgaagttcttgttcatctactgcctcgtgctgctagcttttgcaaatggcctaaatcagctgtacttttactatgaagaaacaaaggggctaagctgcaaaggcatccggtgcgagaaacagaacaacgcgttttccacgtaagtcggagaggcattgctcctgctaatgttgggcagacctgagagtgcatgatgtcacaaaatgtgagaaattcgccacaaggattgccaaggaaatggagaagtaaagctatgaataatgcaggaaatggaattaacacggctctgaatagaaacatagacttctggcattaagaaaaaaatactgggtacatttatttcaagttttagtaaatggtcttttcttttgaaaagatcatttatattatagtctttatataataatattatgtatattattttatatatatatatatgtatacacacatacacaggcacataaattcatgcatagggaaaatgtggaattcaaaaaggaaacctatgtattattgacatcttataagtattcatgtgcactcaatcttgttgaaaatccaaatgcttttctgtatttccacatggcccctcatatgtttcttttgatttttagtgcagtatgaaaaaacatgagcatgtaaaaaattctccaaaatgaatactcaaatctatccattattattgcctaaagcttgcatgaggatgaacagttctcagcagccactgtcaacttctggggactttcataagcaggattgatggcagcccatgctcatgagaacctagtgtctatgccaccacttcagaggctttctgcctgggtccatttccttcccactgtgagaaattgaaggctaggaggttaagaagctgggtggcttctctgcacacagcaatcacgttggacacatgcttgtcttgtcaccttaataaccttcctcatgggccctcatagaattatacacactgcaaaagagtgattttctaactggaagaaaagcaggcatttcacataatctaaatcacccgtagctaaaatgctctagttggtttaatcctgcatctgtttgtttctatcctgatatttaaaactccattttaattaaccaacatctgtttatttgcacagttaatctcacccttttagatttgatacaaactagcagtcataagaaaccatgcaatcctgattcccccaagtctcatctcaattgtcctcaggttgactccttggctctctctgaccttgggctgcagggaggtggtgaaacctccttcagtggcacccttgcttgctaggactctccatggcatcttggctcagatggctggaattattttaggaccgtgtgtgtgcatgtgtgtgtgtacatgtgtgtgtgtacatgtgtgtgtgtgtgtgtgtgtgtgtgtgttgcttttgtttttcttgtgaagtggccaaaggcaatgaaagcataaggcaataaggaccagaaccaccaccttctctctatgcctctcataatcttcctggatgttgtctggtgcctgattgtctctgtggctttctgacagagtgcactattccaagctccacctctcttaaaactttgctggtttttagtgcatatcccattacaagctacttgccaaccccccctcctgtgtggttgctgcatccttcccatgtgctgccgcacagcatctacaatggagtcacctccctccctcatcctctgtactttaattcagtacccagcccttctcacttgcccgacatccctgacaggctactctaacactggtttacgaccccctaaaatttcaaggcatccttttgttcctaatattgtcttattagtaaataattgaatgtaatatcaaaccaaaacattatagtttagatgtccaatgtaaattatctgacataactctagtccccagatttatgctggattgttttagcttaagtatggtttttgtttatctgtacccatgatttctttcatgacttgaaaggcaatagataactgcatatctcagatatcgtaggaccaaatcatctgacaccctcccccaaagatgtttcatttaaattattctttcctgtaaatgacaattatgtttttctcgatgatattaaaagataaataatacaacgaactctgaatgttagtaaataggctgtgtcaggcttaagcttatccttagctgactctgtttttgtgtagcagatgtctgtcactgcaagagagacatatggtgatagttggtgtctcttgttatccgtctacacttgatctctgctttcacattcagtttttccttccacaaaaattttcaccttattacccattgtttcacggatcgtattccaaatggcattaaaattaattcatataagatgcctaacacagtgcctgtgctatcatcagaggtcctcaaagacagtagcaaatctgaaacagtattattttgagtagagtgccatttctcatttgtttcattaacttcttaccccttaccccacagtgcagttgtctatctcattcctttcacccgtgttaccctgtataaatgggcatgtttctatacctctcaattatttttcatttagctcttgctttcaagacttcactaaaatcacttaaggaggcacagggtagccgggcgtggtggtacatgtctttaatcccagcactcgggaggcagaagcaggcagatttctgagttcgaggccagcctggtctacaaagagttccaggacagccagggctatacagagaaaccctgtctcgaaagaaaaaaaaaaagaaaggaaggaagggagggagggagggagggacggagggagggagggagggaggggggagggagggagggagggaggggggaggggggaggggggagggagggaggaaggaagcacagggtagggtatgctgacccctggttcttgtggacctttatcatcttatgtcatactctctgtgactcctgaagaaacttccaatcagggacagctcaccagtctctttccaaactgtcccttcctcattaccagctctcccagctctcttcaccagtgttcccataatccacccatgcagagatcaagtgaaatagaaacccgggtttagcactgcctccctccctccctctcccatcacatggcctttgttaaattcccacggtcagcatcattatcttgtcaatatcttcccttgttcactgtccagggcctaattctacattctctggccactgagtttgtcctgtcctgtcctgttctgtcctgtcctgacctgtctgtctgtctgtctaattccttctcagaaaatgtatttctagaccaagattagaggctccactattcaaaacacccaaatgatttcctgccccttaccagattcacctctggccttcgctggaccatctctgtctttcagtgatctggcctttacctctcttttaagttttgtttccagggtcctaacatgattttacgccgccccccccccccaagctggtcctgggtccccaatgtattatttccttttccatcccactgccccctgttttgccttcacatttctcaaatgttcattcttcttggacatgcttttcctaacatacatccccagaggtacctggtctgcactctcagtgagtatagactgggcattgggtctcataagagtctgcatttgtcaccagcaaatggatgcaattcctaactccttttgtgttttgcagttttctcaccgactcggaagaaactgcatgtcactaaaagacaccaaatagttggtgtttgaagtaattctatgcagaagtttagctaactgtcccctgtaaagggactctcctgcagagagaggggccatgagccttagcacagttctgattaagcaaagctcatttgtatgtattggagttggagccaaattcctaatgtcttaggctggctaattaaggtcatactttatgtactttaatatgaccttgttgaggtagataacaaaaagtaaatgctgagaagggtctcagcatgagtttgtttgcttgtcatttcagtctcctaggacaagaagaaatgtcagctcagaacaccatacttttttttttttttttttttactttattttgtctctctagctctcaacatttagaccagaaggatcatggtcatttaaaaaaaaaaaaaaaaaacagctgaaaaataccttctaagggaagtaagtaaaatgcactttgataaaaacaaaaccctgacccatataaagtgggtcttgagtttagagatcaccatgtattttgtggcatatcagttaattagattactgcattacctcgggaaattaatgagtgtttcctaaaaatatcggttcttttcactaacacaacgtggaaaatctcagccacattaaggccctctgagatgtgattcagctaacaactcctaaatttatggacagtataggtctatgtggatttgagaatcagtaatgattaaaatattcctggaagcaatggctttgaaatattaacctacatgaaagaccaacaaagaaacaactcattcaggaataccctaataccaggagcttagttcaccaaagaagcagatatattttagctaggggaaatgtcccataaatctccccagtttcatcccactaaacaaagggaaaagaaaaaagaaaattctatagttggtcacaaaatgtctttttgcatttcccatgttgaatcttaactttttaaatgcctgtagacatttgctaaacgattgatgaccattctttggaaaactcagtccttgcagacagaaacaaatggggactttcaaccatgatggccatttaatctgcatgggtgcttttataggaattcttgaggaggcggccataatgaaaaggccctcctcatgtcattgctgtgtaactacatcttttctttcctgtgtggtgcatgtatgtatgtatgtatacattgcatatggaagaccgaggttgaagactggtgtctcttcagtttcactgaggcatgtctctcactgagcccaaagcatgctgatttagctagcctggccaccagccctgggcatcccctgtctccaccccataaagactaggatttacatttccaatgctataccaaaagtcccccatacccacccacctccactccccaacccacccacttcccctttttggccctggcgttcccctgtactggggcatataaagtttgtgtgtccaatgggcctctctttccagtgatggccgactaggccatcttttgatacatacgcagctagagtcaagagctccggggtagtggttaaatacctaataaaaaatggaaaaaaaaaagaatctctagaattccaaacatcataaaattgcagaaattatctgcagctggcaaaatcacacccctactagtgcatgagacagatcatagtcaactgctgtggacaatttaaggtagcctcatatcccataactggacttaaagcaaaaacatgttcctataacatgtttatagaactaaaattctcactacagaatcccagaaaggaaaggccagtactgggaggaaggaatgtgagaacttgtgtgttcccctatagcccatggcaaagaacagtgccacttacagatgtacaacattaaaaaaaaaaaaaaaaaactaggatttataggcaagagccagacctgcccagcttttgtgtgggtgctcgggatctgggctccaggcagtggattacacagcaagtactttatctactgaatcaaatctcagtcacatggtgtaaaacttcctgagatgctcacttgtgttaggacaaacacatctggattatcattgtatattcctattaatagtcatcactactgggaaagaaaggatgcagacaatcctattaaattcaaaggatgtctaagagttactaaaacttaaagaattagaatcttgcaccaaattaagctgttttcatgaacttttctggagttgatgagttcacttgagtctccatgacaatttcaatggggctctcccatattgaacgcatcttcaccttctcatgcaacacccttccttctggctaagcatggtcaaagcagcacctttgtcacagttatctattgcagcatttaactcttctaaaatgtaaagaaaaattagatttcatctcctagaatcagcttttcaactgatagaaatttgaagctttcatttgtgaaaagcaatagatttgtagaaataaggtctaagtggcagtttagatatatttggttaaacttctttgatcatgagggccagatgtgaattgtgtcagtaacaggctttctgctgtaagaagatacatagaattgagccctcgggtcctctgagcaaggaggataagcccagctttaggaagagagagttaccacagctggcccaggagggttctgtcctcatcagtctcagtatgatgcaatgtctccctgtgtattcttcttattctatgatttattcatcctctgttgtctgcatctctgtatatattgtcgcaaacctctcccataccctattgccaatgagcctcataaactcaatctcaagctctttgagcatctacatcatcttagtatttcctccagagaggaagtctggtcatgttccccttaggtcagcctcatgaattctgtcttcctgggtcatctgaccatagctgacctcgtattcactggtgggcagctcaggaagggatgaaggagctatgcagctggaatgtggttgacttgttctctgaatgggattctagtctaggcctggtctttctgaagactgaaactccacccccttagactccatgccaggtaccccaaggtcttcatttttgtcttaatttttctaataaaatgtagatatagtcttattttgaatattttcaagagtctaaaacctttactaccatcttactataccatgttaatgtgttatataaaacattaaaacaaataatttttaatttgggtacaagtgattttgatattattatattttctcatgttaaaataaaggacatatttcccttttaataaaacaaccagaattcacttggaaacctgagtgagtaaaatatgccttgaaattaaaataaattatagtgtgtaagcactctgacactatctgttttccaatgtagtatatggcgtacaggtccagttataaatgtaaaaaaaatctgaaaaccaaatttaatttgttttaatcttttcataacaaagactgaaccagaaaaagcctgactggatctcatcaggtagtaagctttagagttaactctccttcagagaccgaggacaggactcaacaagttgtctacgaacaaatagtaaatattatacacactgtgagtcaattgttctcaggtgcaattgtgtatttctgccagcacagccagcacaaaacaaactatagacaattcaaaagtaatcaagggagactgtgtctcataaagatgctaagatacaagctttgtataatgtccatgtgtcgtgagcattatattattatctctgtattttcctccaaccatgtgagaaattaaaaactattcttaacacggcaatcaaacatttccagggtctgattctcctttctccatttgctccagtgaacaaaaggtaggttccaatgccctttggatagtatagtaaatagaacataggagtataatttttatatcagtttgataaaacattttaaattattttattaagtttaatttgtaatctttgtgctaaattcataccatatatatgtacatacatataatatacattataagattacattaatacgttcctattttattacaggttattcgagacactacagtccctgttttggtcaatatttggactcatcaatctctatgttaccaatgtcaaagcccagcacgagttcactgagtttgttggggccaccatgtttggcacatataatgtcatctctctggttgtcctgctgaacatgttaattgctatgatgaataattcttaccaactaattgccgtaagttgacaatttacttttaactcaatatcctttctgcttaatgttgttgtctcctctattctatcttctcatcagaagaaataaagctataatatactattgaggagagaaaggtcagaattgtaaatggttaattggtggtgtatgtaaacactagtatagcataaatggctgtgtattaatctatttttctacacagagtaacagggaaacttaagtcagcctatgttgccagggagccatcaccatcaaaccatttagaatgagatcagccatctatcagcagtccatcaggctcagcagcatctctgtgactgtgatctgctaactcagcataaacaaacccagccagcttggaaagacaaaaataaatcttagagataaagttggtaaagaaagaaatttttttttcataaagcctagaaaaagcagaggctggagagatggctgagcatttcagagcactggctgcccttctaaaggtcccaggttagattcccagcactcccatggagctaataacagtttataactccactcccagggcatccagtatcctcttctggcttcagctggcaccaggcacacatatggtgcacagatccatgaaactgattttctaaaagcttagtaaatacaacaaatatagaaatgatcttgaattctctagatctatatgtgacatgatatatattacttaaaattctggcttgtaaacaacatagcataatttattaataatcttacaaattctgcctagacatagttgcttaaatctgcaatctcagaaattggaagattgagatgggcagaccattttgaattcaaggctagcctgagctacatagcatgtttcagaccagcctaggctaaaacatgaaatactatgccacaaaacacacaaccttgtgtttaccaaggactgttatagaaacattgcaacaatggaggtggggtctttgtccatgtaaaactttgaacttatgaacttgtggtctaagtctacagagaacagctatatttataaactgaagcttaccatggcacaaaacatgcatgagaagtctttcatagccacatcttagtgtacagcataactagatgctgacagttttggcggggggtggggcatagcgacagttatggtgtgcctttgaatctatagcagaacttctgaaccactactctgctcttggacaagtaggactctaaattttagtttgattttcttcacagaggtaaatttttctgttacctctcattgatgaaaaaaggcagggcatgagaatacgacatttgtatgtttggttcacaggctatttgttagaagtcctctgactctactgagctggggatgaagaccagagtttatggctacacagaacctcatggaacattccagagcctaaagctttggtttttttgtttgtttgtttgctcgtttgtttgtttttgtttctttttatttttgtgttggggtgatgggtttgctttgctttttgtttgtttgtttgtttctttctttctttctttcttttgtttcttttgttttatttagatagatcccacatatatccagagtactagaaaagaacagaaactgccaagctaggtacagagacactgccaacagtttggatcccatggaacattagatgtcccagctttgttcagaagaaaacattactcaggagtattgtgacactaattcattgcttttttaaagtgaatcttgtttttctaggcaatggatggaaaacaaacctcacatcttccattttatttagcccaaatactgaaaccattgtaagatgggcaggcatcaggacagagttagagaagcctcagtcatgtgagggaaactctttgggatgtttgtgtgtcgagcattgaagtctgtgtctcccagaatcatagcactggctctgcaagccatagggtaaatgaaagaatgtagaatattaacacaagccataacaaaagtcttctcatacttttacattgatcataaatttcttatgcatctactgtgtatcagtcatatacttgacttcttaaaagttctttgtctcaaaacatataacaggaacaaaagaaattagcacaaaatttcaacattgaggagagagggtagaacctgctgtgaatgtgcctcctctgcggttctaggtttccctggagtgcagaacttgaactgagcaatggtatacaagcatgtagtctcatgattatgctggactaacagatgatatttgcccaccatcctgggacacaaatctcctgcttaatagctcttgtatgatagtcacacccagacccagtgctgtggtagaggcagtatgctgcattgtgtgttggtgggatttctctgtaaatttgcaccagtagtctgaaggagagagagagagagagagttatccatgtggaagcatctctgtgaagacattccctgaagcaccaaaggctcgttggtgagcatctgtgcacgtggcattcaactaagcaatgtacaaggactggcctgagatgtaaagccatgcctctgcctggcacctaatgagactgaaccatttccagggctataactgcagcgttggctcccagtcataactaatcgccaaggtctcttgaatatacaactgtcaatctctgtttccctgaagaaggatggacagagtgacagtgacatatgtccctactgggtaagccgttgtctctgggagttagcagtgttttttataagccatctaattaatgctccaagagtcactctgtgtcaggttcaggttctgtctgggaggttttttttaacttgtcatttctctcattcaggaccatgcagatatagaatggaaatttgctcgaacaaagctttggatgagctactttgaagaaggaggtaccctgcctacacctttcaatgtcatcccaagccccaagtccctgtggtacctggtcaagtggatatggacacacttatgtaagaaaaaaatgagaaggaagccagaaagcttcgggacaattggggtaagggcacatcctattagtgccacaccagctgtcgagcatgtgtttgcgtagagttgattctttaccaaatatgggcaggtcttattggggagagagacaaggggagagagggagggagggagggagggagggagggagggagggagggagggagggagggagggagggagggagggagggagggagagaggaagagagagagagagaccttaccaatcatatgcataactgagaaaacaaatctgaaaaggagacatggcagattaaaagagatcaatatccaaccctgtgggggtaaaagagagtcacagccctccagggaggtctctagaagactgtgtgtcccaataggggatgctggggggtggagtccatgaaaccttgttgctctctctgtgctcccacctgtgagttatcagggaagtgtctggtgtcatgacttcctgtcctgactgactgaccacacagtgaagtttaactgtacatcgcttgtgttcagatctctgacagagaagctaggactcttccccagcctgttttctgaataaaagacatcagtcacatctcagtagaatccaccctcttcaaagaggccactctattctattagcctaggcgtggagccacagccctctttctcttctaccctgatttctagcttttctgcaattgcaacagtgatttatctgtggcgtatctaacactttgtctctttctccctctgaactgtagagtccatgaggaaagatgcatgctgcagtatcttcaagtcctagtgtctagcactgaatccatcacttaggatgatattggctgttggtttgccggttatagcctttataactcttcattagatctgttcccttcagtcctatggctgtggagagactccatgactactaaaactcatataaagggaagcatttaatttaggattgtttatagtttcagaggttcggtccattgtcatcatggcccaaagcatggtgacaggcaggcagacatggagctggagaagtagctcaacagttctggatctgcaggcagcacagagagagagagggtgggggtcaggactggagatatctttggcttctgatatcccaaagcccaaccccagtgccaggattcctccaacaagaccatacccacttcaacaaggccatatctcctaatccttgtcaaatagcaccaccccttaatgactacctattcaaatacatgagcctattttagtccgttctcttttaaattaccatattttactccctggcccccataaacttatgtccatatcataatgcaaaaatgcattcaggccaatttcaaaaatccccatagtctgtcacagactcaaccctgtttaaaagctgaaagtctctctgagactcaaagcaatctcttaactgtaatcccctgtaaaatcaaaaaccagatcacacacttccaatatacagtggcacaaaatatgcattgtccttccaagagagaggaaagtgagcatactgaagtaacactggacctaaaaaagcagcgaactccaaactctgtatctccatgcctgatgtcaaaatactctccagatctccagctcccaccagctttgttaactgcaacacaattatctcttttgggatggttccacacttggtctacagctttcctcaggaagtgttccacagctctgcatctccaacattcttggggactctagtgaaatccaggactcacctacacagcttgatgcaagagaggactctatgcaagggcacccctgagatatgcctagcctcattggctttccttagtctaagagggagattccattacccatttcttgtatccaaagctgccaagttctgctgctttctggggctggaacttggccacctctttcaaatacattttgaccagggtctgttttcagtggtttccttcacagcgtaagctttcctttacctttcaccagttggaagcatatgtgtgaggtctttccctgaggtgacctcttccttttcttcttttaagatcagattttgctttaagctttatttatctccttgagcactggtgttatctccattatatttcttggtgctccttttcccctcaaactgtacatttactttctgttttccttactcagtttgcttttttttttctattatagatttccgttaagactggccattaataaccatgagacacagcccatactaggctgtcttgaaatctcctctgccaatgccattaatccaaaattcttcagtttatcctcaggcagacattttgaaaaatgacaagatagagccacatttcttgccaaaatatcacaagaacaatctctaggccacttactaaaattctttctgaaacctcatgagcagggccatcattgtctacactgctctcatcaccactgtcttccctgctcctattactatagcacatcaatcccgcttagagcattcaactgctttcctaatctaaagtcccaaaacccacctttcaccaacagcaagcatggtcacagcaatactctatttcctagtaccaacttctgtcttagtacctaaagaccatgcatgcaaatatatgagtgtatggggtcattactactcaaatcaccacaggtcctggtattctgaaataccagattctatttggcccattgtactagtaaagtctttgagctggatttttcagttccagcttcctttcagcttgaattctccttaatatttctgtctatttaaagaattcaattttcaagtgctaaattgactttgtcatttcatttaactgtatgtctatgctttcttgaacatcacttaggcatttattgctactttctttaagttcattggagtgtctgttcttgtcttttaaacgtctttatttctttgaagtgtattagtttattttaaaatctgtgtcctgtgttattttgaaatctgtgttcatccaggtcattctcattggaaaccatttctataggagtcgttggttggggtcagggacatgtattcttgttggagaccaattctataggagtttggttggaggctgggacataatgtcttggcctttcctattgtttttgttttgcaatgtgacctgggcatgtggacttcgttcatatgtttagtctgagagtcttgcctgtgtcatgttggaccaatgtgacagctatatatcttgaggtagctttgggagtgtggagatggcgtgagtatgattaatctagagggaactcaccaagaaaagtgtgcagaagctgtaaaaactagaaacaaggcctggattgtggttctggcactgtcagctgagggccttccctcttgtccttgactacacactctcacggcttgtgattagctttcacaggctctctcctacagagaatgccatggattgtccattcaacccagtatcaattctaagtccaatgagaaactccctggcacgagagagtcactgcttaggagaggtggttttgtttgcttctatatactatgagttctgcacttgaggaatcacggttggagaatataagtgaccttacaatcacagctgaccagaaaagtaacataaaaaacctcttagtaacttgctgcctttattagcaattttaagaaagagtagaaatcttttactctaaatgtttgatttgcccacttggctgcattaaattcaaataatctttaaaatgttgtagaataacgaacagaaaaagtctttcagggatcacagtaagcaacaatggcaagtgtccacaggtcagtaactcagctagaattcgagtgtagatgaggtatgaagatggggccccattcttgaagggatctgtggggaaagtacagcagtgaagacactacaataatatctgctaaacaaactaatcgatatgttaatgtggtaatatacaagatgctttacaaacaatgcatgcaatgactggcattgtatgtaaaacatgtgtaaaatgtttcctggagtgtgcactttcagatttctcctttctggatcaaagtttatttgctgcatttcaatgtaagaagtttttagaggcagggtcacattatgtagcccaggctagcctgtaagtctcagagatgcacctgcctttgcatccccagtgctgggattaaaaggatgcaccaccacacctgactaaatttctaagattgttttaaacagttcttcaagaggaaaagacagcaatgattacattactttagtcaatatggcctagtacattgcttcacacacaagtgttttgattttgaaaaacagaaagccaactcatggaaatgtgtctttcacatttatatcttaggcaaatcagggggaacctggggttttaatatgcccatgaaacttgttataatctactacactctcatcttaatactatatcctcctgttttgtccacacaaaggctagaggaccactctcagaactgcctttctgctgtctccaaagcccctcactgaccgtcattagtctatggcacctccagtccttaggtgcaaggaaggtcttgaaattcatttggacatcctcccttctaagcaccgaggaacacaaactctagtttgcttctgaagtcagaaaaggtttagttctttcaaggtgcacggtcacagatgcaagaccacagatgacattcagttttctgttaaaggaccaattcctatttttcaaagaataccttaaatggtgtaagttccagagttttcttggctatagattacatcctcaaaacacaaaattcttctgattctctaattttacatttacatctttggctccaatctgatgcacagcaagataatttaagctaattggccacaaacttaatttttttcttttgcaatatacatttttccaaccttttattgtgcatgctttagtgatttgagaatttatgtcaaaccaaatattctgagtcatacctgcatcccccaccttcgttgtagcatcaaatagttcttattttctccccttaagggtcttgggtaagctttataccaaccatactcagagtttggtctttttctactctctaaagatgtatattttagattgtgaactcttaattgtggtatgagtctctctctctctctctctctctctctctctgtgtgtgtgtgtgtgtgtgtgtgacattatctgtacagtttgcttttatctacaaaacaaaaagggcatgaactcattattgtgaaactggcccagaaaggtagttcagtggtgaaaggtgctttctgcaaagcctgaagagctggacccacatggtagaaggagagaaccaactcctaaaagttagcctctgacctctgtacacatgctatggcatgtgtgttcacacgcatatatacatgcacacacaaaatacatgtatgcagtttcattttttaaaaagatggttgtcagactgtagaagagttaatgaggaaaaagggtgcaaagtcattgctattgctgtgaggtccctcagctgtgatgtcactcacatttggccaacctctgtgacaatttactgcatggacacttgatctttagaaaacaacttgtttactttatccagtttctcatgatcccttggggacagaagcaaggggagctgggtgacaaataggtcctttgtttctcagtgtacttggcttcctgtcaccctctcttatccctggaaagtctgaggagtgcacagcaggtttttgtgtttcacactcagcttttgatttttcagtgaggccttcagagatcttgagcaactatatcttaaagccctgctttaaacaggcagttttgaattatgctccgacccacaacatgtgtaaatttatgccatgcttttaaaaaattcacaattcagccagaggtgagtatggtcttcgaggcgttctctctaaccttcctaatgtggtttgcttagaaagtcttgtcacccataagttgtgtgagttcacaccgctgatccttcaattcacattctcagaaagcgtctcgaaccacaactcttcttgggtgtgactgccctggttacttttcaggagccattattgctcagttcatcttgttcaagcttcctggcaatagtgatttagtcgtcctgaaaactcatcaatccatggtttgtcttaacctcagacttcctctgatggataattggtattttcaggtaaatcagcctttcccatgattactttatgcaggaaaacaaatgatgaagaaatgttttattgttgagcaaaacctttatgaaggaagtgcaccccttattgacagatgttctttccctaggcaatcataaaaatcccactgaaaggccaattactgagaatacactaatcaaataacagcaaaatcatgagtctgagatttttttaaaaattttattgtatgtctgtaatctcttggaggtcagaagaatgtgttagatcccctggaacagagttgcagaatgttgtaagttaccgtgttcgtgctagaaacgaaacctgggtcctctgcaagagcagccagcgctcttaaccatggcgccatctttatagtcccttttcaaatgtttgtcagtgctttcagtggtattaaagctttagtcctcagattccagcttatacaagagtcatctagaattcttttatagattgaaagtttagtgagaagtccctcatcaaagaaagcattatgatttatctcagctttataagctaaaactcaatctctctgcttattctcggagtggtttaaatacatttaattaaagcccaagaagactaaagtactgcctccccaaagcattgaattgaagtgaaacattcttaatgcttcagacaggatgggtttgtaactgggatgcttaagttaatagggcaacatactaactccccaaactaccaaatctttcataaaatcatggcatttcttgagttttatattttccactatgtgatcttctcttctgtgcatagtaaaacatgaagcagggtctcagggtcactcagtgtcagccagcctcagcatgtagatgagcaattaaagagtcagcagttgccacagaaatacaactaattaagtcagtgacaagagaattagaacctgtgaatgtgctgcccccatccccagctccccatcagttgtaaaagaaggaagacagcagtccatgcctgcacttcatctttagtggtaatttgtcaaaatgtacagctcaagcttcaccactctccatgggcttgactatgggtcttacagaaaggacagcagccatccatgaaaagcctggttccccggagttcctgctggaagatttgctgggaacagtttattcaacctgcttttttttgttttgttttggtttgggtttttttgttgttgttgttctttgttttttgtaaaatagttatttacatgtagttagttgagaactcacactaacattattttctcatctgacagaattaagataagagcaacataggaacacatgacacatgtcattctcaacgtacacgatcaagggcacatgatataaaaacattgaccctgatgtttggaataggatatatatatatatatatatatatatatatatatatatatatatatatgaatatggatgtgatatatgtgtgtatatatatatatatgtcagctgaatatacttatatttcaaaaggagtctaaaattatgacactttgtagttgaaatttttgtaaaatagttatttacatgtagttagttgagacctcacactaacaataaaagtttgtgacttttgaataacctgtaattcatcctctgtactttagcacttgtgagagagaaactacagcttccttgaaatattgtgactttccaaaggcaacttggaaactggaacagccattgtttccttcttctaaaccaagaggacttcattaccatttttgacagatttcattttgatacatttaaatttgcttgctcaaatgggaggtggtatgggatgtgcttggtgtgcttggaacttcaggaatgaggccctgatctcttggtctgacaagatggtatctgggaatcctgtgtctttattttagacatttagaacgtgatcttatgaagaggaattcacaactgcgtgctgcagtggtgagaaagtgttttctagaggacactaagtaaattcttttcaagcagagtcaaacagcaatttctggaggaactgattccatcctgcattggccccttgccgttttacagttctgaaggagaacacagcaggctgcatccttaataggattcactgagcagaggaaagactaaaaggcataattcatgggccgggaacttagtgacagacagaaaccagagtggaaatgaaagaaaatgaccctgaacgttgactgcagggaatcatcggcttctgcagaaagtctgacattccacagggtagacctggaaagaatagaagctaaaaagccagcaaatgtcacagtgccttccctggagcccctctcctgttacaaacctctctctcagtttgagagagcctgtgcagctgttggaatctcagcttcccttgcacagtcaaggcttctcacgacttcattttcttcccattagttctatgattcaaatgccatggtctagtccaacagatcaggtggaacctgcttatgctacattagcatatcttcagccgccacccttaccccctcccccgcccccgcccccatcttgaatgctatcctaccagggaacattacatatgcaatccagcagcatgtagattattgacatgtgtataactggcgaagagaatgacaccaccaagtgtatgtcttccaaaatactctccctagactcacgctaaattaagtctttgatcttggcccattttaacgtcagacagagttgacaaccaatctaattaaaaataaaagctacaaaaatgcaactctcaacactgcaaaagcttcacagaaatttgattatcctcgttcacttagtgcttttaaattaaataccccgattacattattgttataaacacacctcagttgattcaagatgtgggttgttccggtgacaataatgatacagtctccactctaacaatagtagaaggcccttgaacgtcagcagatctttacccaatagcaaggtgacaaatatcccaagtataattgaagaagatctgatagatgacatttaaagatatcactaattggcaacaatttattatgtgtgttacaaagggtataatgagtttaactatcttcctcttcttacttctaatgtttaagttagaaatcacaagcccctagtaccttgcaatgtgaacttgttggtaataatatttttaaagctgttttattgggttcttatacctctccttctcttccaaccctaatcccttccaagcctccaacactagagaggagaggaaggttagagggggaaagggggcatacctctttcaacaacaaaatggactagttcctgctgattagggatgttatttttctcgaggtcagatcaatatttggtctaagtatatctccagctcctttttcttgttgatttgctcaagaacattgtcaaacctcaacaacagcaaccaggagcagcaggggagagcagcagccaccccaggctgtctaggggatcttccttttccgagagtctccagaattaaaccatctgcagctggcaaaatcacacccctgctagtacaggaggaaaatcataatcacctgctgtgaagcagtctcttatcccatacctgagattaaaataaaaatatattcacatagcatacctgagttttttaaagaaacaaacaaaaaagtctacagtttactatagttgtatataggctgagaccataaggttcaagccatgtgcagacacaggcactgtataaagctgcacacagagtgatggagcttccagaacaaaagtcccaatgatctgtggccatggccagaagctacaaagttctatactgcctgatgccagaccactatcaaagaagtcacacttcttcccttagcacttggttaattaaagacccaggtactaaggtccactgactgcactgtgccataagaggtttctcatgaagagcctagactaacttttccaatactgttgctctcagtaacacttgtctatcttgacttgtcaaaatcctggtgcctggagttcagtcggaaaccccacttctggttacattcttgactctgaacaatattatctcttccccatattcacaggacattcagtcttcaccactgagtttaatggtgtattttccattatctgtgtcttactccatcaccttacagaggacaagccatttaagtgtgcttattcaatttactattcggaagattctgcttgcctctgaaagaatattgtctatatggacgtgtggtcacctaatggtgtattttaaatgggctgtacaattgaatagctcttctatagagacaaaagagaatccacagagattgctatagaccagtgtatgcagagttactcataaagatcctggactcctacaataaatggttgacttctgagtttgaccatcattcttgtccctagccgtatcacttcaaagccaatttctcattcccacatctctttactccaagggtatcagcatctcatgatctagctgaacaaagtactctgataagcatgaagcacataaaaatcactcaaagacaagcaaatgcactcaaattatatttcctcagaagaaatccagagattggtcaattgatgaagtttgaggattcaggggtatttttaattcgtgtcaatcactaattaataagtgaagaaagatgaataatgccagtgacagatgctatgaatcatatctcttatttaatgtcctaaattacccaaagagtttattttcactgcacaactttaatgtccctctgggatataatcagttttatccacatctaatcttaactccatgttcttaatattgtaataccactgcccacttcaaatgcagacaataggaacagattcataaaactagaggctaaaacacgggtctgtgctgagtcactaggaaagggtatagatgggctgaggagtgcacccttcatgcacatcactaggtgagtgtgttggttcagattcaccctttctttaagaaagtggttatctcacctctagcaattatgctgacattaaacagctgatataatatcccgaggctaaagggtattgtgtaattcccaaggagatggagatgataattagtttacacaaagtaaaccttaaacctcacccacggaatataacccctcagttagctaagtgagcttttcctatgcctttccttttctctgacaagctttttatacttgttaaaattttccccaagccaatatattatgtttcactttaaactacgtactttattctcttgcatatttgaattaaaaatgttgactatggattttagggacggttctagaacttgaaaaaaaaaactctgtacattttaatgtttaaatgcaccatgatatctttgtttatcactcataactctgagtctatcaaccctaatcttagtttaatgctcaataaagctcaactatgacctcaggctttttttgacattatcttactgaatttaaaaagattctaaaaccagcgaaggtagaccaactgaattggttctatattaaataaagggtctatatacttaaagtatcttggaagtcatttgttgatgttgaatactttttagtaaatgttaaagatacatacatacatacatacatacatacatatgactcattttgtgcttctctttattttaagcaatgtcacagggtctggaaggccactgtctttttctagaaatgctttttctcttggaatttatcttgggttttgtttcatcaggaggtagacaccacccccatctggtggcccagccataaaacttccatgctacactcttccagatggtctaattttctagttttcttgttggcaaataccttaatcatagagagaactcagttcgcatgtagtgaacgctgtcttttggtaattagtggctttaggaatcaaagcattgccttcctttcttcctgtaaatcactgcttttcttgaaacacagacactgcttaggctcagtagaatagaattttgacttttaatatatatttttaaaatatcattttatatttatgcactgctctttctaaaattctatcttatcagcctatggttaaatatttactagggaataagctcaaaagcctcattagaaactaagaactattattcccttagcttctcaaaatacaccaaattaatccctttataacagaaatgttttacttgggttgacttttttcagtgttctttcttaagaatcaatgccgctgcttattaaaagtgcattatgtggggtcaccatagatgggtttctattaatgcttttagaatacttatgaaaggtgaaaatgtaaaattttaatctcatttgttgtttaactcagtttttaatggactttgttcaccatcagccatcttctctccattctgtacaaagaagctgatatagtgtgcagacccacctaaaacatcccagtcttccaagagatagcagagttgggagcttggcgggtgtgacgcagtgggaggagtcagtcacactccggcttccctgggtgctgtctccaaagccacaaggtgaaaggtagctgaaagccacattcgataccttgaaaatcataagtttaactagtactctggctgattttattaaatcttatctaattaaaacagaaagttccttcagtggatgtatgactgaaactgctgcaagttcaccgtcccccaagattgcagattatgtattgctatttacagtgactgattttctatatttttctgtgctgatatttatgggaaaatactaattccatttgctatttcctcccctggttatttcctgtctctgccttcagtatttctagggatgccgggtgtgtatccagtacggtcagttcattctctcacagccctgcagcctaaccaggaccccatttctagcactgttaatttattctgctttaagagttctatacgttaaagacttgtgccttttcactttagttcattgactctttgtgtgtgaaacctctctgtgactatggctcattgcccccactttggtgataaaagacaacaagaacagtcttatctgcaaaagcgataactttgaggataaaaaaacgtatctatataaccacacgggaatatcctttccttttcagcggcgtgctgctgataacttgagaagacatcaccaataccaagtaagtagtgcttgtgtttgttcctgaaatggccattcaaacaaaatgcggatctgactcgggacagaaagtgaatccatgcactgaatatcaatcctgtcgttcaggaggtgatgaggaacctggtgaagcggtacgtggcagccatgatcagagaggcaaaaaccgaagaaggcttgacggaggagaatgttaaggtaaagcttcgccttcatcgcggagacagcgtgtggaggcagcctttaaggccagatttacaaacctagccatgcctcctgtgttttaaattaaacttccatggaactaagtgaaagggcagacagacaaacagaaaaacaacagcaaagtagagaaatttcccaagttgctttgaaacatccttagcccacactgtcaagggggcttaacttagtggcaaggaaacccctagtccttgttgcattctgatccatgtccccaatccctgctgtgccacgtcagcttctcatttgtatttcagtctgatttctaaatcggaagcatttactaaccaacttactaccaatagcacaagcttcctgggtctctgtggtatcttcttgggggcagggatataaagttttctatattgcaagttggaaatcaagttcaaagacttctaaagttttgtgagaggaaataagtgaacataggcaatggtattttaacattaaatgtgaattgattctttgattttacatggccctttataaatttcggaagaattctttcaggttaatgtgattttacagataaaaccaaggccacgaaagcatcaaagatcattagagaaacaagagctaaacagtcattgagataagcaaggagaggagctgccaaaaagacagcacagattgtcaattaaatagactccaaagtatttttctgcaaccataaatctcaatgatgaggctaaatgcttccctttgtcctggaagacagtgtggctctggagtagaagagaagctaagaaagaggttttccaatgaaataagaaaaatatagggatctaggaacctcgtgtaaatgagagccaggacttctggacccaatggttggtctaagccccccgcagaaggtattgagaacagaggcagtctctcgaaaggctaaggttcatgttatttttactttgcacatccttttcagagaaaaaaaaatatcgcattaaaacacgtgacccaaggaccaggaagtggcttgacagttagaagcagactccagagaggaagtatttaaaaatcactgtctccaagaaagtagacaacccaccgaacagtgacagagcgcacaatcccttttgtttctctttctgttacacttagaagatttctttatgtgtcccagctgcttttctcattgatgtcacaaaacactaaagagaagcaactcaaaaaagaaaagatgtcctttgcctcatggtttgagaagcaatggtccctagtggcagagaaagcagagtggaacagttcgtctcatggcagccaggactagcaccactgatacacccagaagcatgttttagggatctctctgctccgtcatgtttgacataaagaataaccatcatactagaatataaaataccaataggaaaattaatgataccaggtatcagagtcagggcctgaaattctaagtagaatcccaggaggacagaaccctgcgtcttcaaaagaggcaggaccatttcagacagctctatgaaattaggaaatgatgtttccgtaagtcagcacctaacgtgtcatttggattttattcaggaactaaagcaagacatttctagcttccgcttcgaagttctgggattgctcagaggaagcaagctctctacaatacagtcagccaacgcggcgagttcagcggactccgacgagaagagccagagcgaaggtaatggcaaggacaagagaaagaatctcagcctctttgatttaaccactctgatccacccgcggtcggcagccattgcctccgagagacataacctaagcaatggttccgccctggtggtgcaggagccgcccagggagaagcagaggaaagtgaattttgtggctgatatcaaaaacttcgggttatttcatagacggtcaaaacaaaatgctgctgagcaaaacgcaaaccaaatcttctctgtttcagaagaaattactcgtcaacaggcggcaggagcacttgagcgaaatatcgaactggaatccaaaggattagcttcacggggtgaccgcagcattcctggtctcaatgaacagtgtgtgctagtagaccatagagaaaggaatacggacactttgggtttacaggtaggcaagagagtgtgctccaccttcaagtcggagaaggtggtggtggaagacaccgtccctattataccaaaggagaaacacgcccacgaggaggactcgagcatagactatgacttaagccccacggacacagctgcccacgaagattatgtgaccacaagattgtgacccttggaggagtgtttaccatacctatacatattttccatagtgctctgggcaggcaaaatgtttgaaatcccattatcaaatgctaatttccactttctaatgtttatctgttgtggcatattaacctgtaatatgtttgaacaaagcagaagtaatatgaaccctcctcttttgtagcctgcttttgctttcaccgttgattttacaagtgtttctgttaaataaacgcaccttttatccttgtactgttacaataacccacagaaaatttttagctatctttttcaattaaaaccaatgcaattgttttca

SEQ ID NO: 13 - DNA, 3238 bp, Mus musculus
  source 1..3238: mol_type = other DNA
actccgcccagttctgtgccagctgcgtgggctctggtttcgtgcgggtttttttcccccttggaatgctccaaaaaactcggtagcgactacggaaaccccatcggaactgaccagctgcgctagcaccaggcacagcactggtgctgcgcgctcgccgagcccacctcggtcacttcaaccaccagattgcaactttgcggagatgatgatggactagcatggcctgaagcatggctcagttctattacaaaagaaatgtcaacgccccctacagagaccgcatcccactgaggattgtcagagcagaatctgagctctcaccatcagagaaagcctacttgaatgctgtggagaagggggactatgcaagcgtcaagaagtctctggaggaagctgagatttattttaaaatcaacattaactgcatcgaccccctgggaaggaccgccctcctcattgccattgaaaatgagaatctggagcttattgaactattgttgagtttcaatgtctatgtaggcgatgcgctgcttcacgccatcagaaaagaggtggttggagccgtggagctactgctgaaccacaaaaagccaagtggagagaagcaggtgcctcccattctccttgataaacagttctctgaattcactccggacatcacacccatcatcttggctgcacatacaaataattacgagataatcaaacttttggttcagaaaggtgtctcagtgcccagaccccacgaggtccgctgtaactgtgttgagtgtgtctccagctcggatgtggacagcctcaggcattcacggtccaggctcaacatctacaaggccttggccagcccctcgctcattgccctgtcaagcgaagaccctttccttactgcctttcagttaagttgggagctgcaagaactcagcaaggtggagaacgaattcaagtcggagtatgaggagctgtctagacagtgcaaacaatttgccaaggacctcctagatcagacacggagttccagagagctggaaatcattcttaattaccgtgatgacaatagtctgatcgaagaacagagtggaaatgatcttgcaaggctaaaattagccattaagtaccgtcaaaaagagtttgttgctcagcccaactgccagcagctgctcgcttcccgctggtacgatgagttcccaggctggaggagaagacactgggcggtgaagatggtgacgtgtttcataataggactactcttccccgtcttctccgtgtgctacctgatagctcccaaaagcccacttggactgttcatcagaaagccatttatcaagtttatctgccacacagcctcctatctgacctttttgtttctgctgctgctagcctctcagcacatcgacaggtcagacttgaacaggcaaggtccaccaccaaccatcgtggagtggatgatattaccgtgggtcctgggttttatatggggagagattaaacagatgtgggatggcggactccaggattacatccatgactggtggaatctaatggactttgtgatgaactccttgtatctggcaacaatctccttgaagattgtcgcgtttgtaaagtacagtgctctgaacccacgggaatcatgggacatgtggcaccccaccctggtggcagaggcattatttgctattgcaaacatcttcagttccctccgcctgatctctctgttcactgccaattctcacctggggcctctgcagatatctctgggaaggatgcttctggacatcctgaagttcttgttcatctactgcctcgtgctgctagcttttgcaaatggcctaaatcagctgtacttttactatgaagaaacaaaggggctaagctgcaaaggcatccggtgcgagaaacagaacaacgcgttttccacgttattcgagacactacagtccctgttttggtcaatatttggactcatcaatctctatgttaccaatgtcaaagcccagcacgagttcactgagtttgttggggccaccatgtttggcacatataatgtcatctctctggttgtcctgctgaacatgttaattgctatgatgaataattcttaccaactaattgccgaccatgcagatatagaatggaaatttgctcgaacaaagctttggatgagctactttgaagaaggaggtaccctgcctacacctttcaatgtcatcccaagccccaagtccctgtggtacctggtcaagtggatatggacacacttatgtaagaaaaaaatgagaaggaagccagaaagcttcgggacaattgggcggcgtgctgctgataacttgagaagacatcaccaataccaagaggtgatgaggaacctggtgaagcggtacgtggcagccatgatcagagaggcaaaaaccgaagaaggcttgacggaggagaatgttaaggaactaaagcaagacatttctagcttccgcttcgaagttctgggattgctcagaggaagcaagctctctacaatacagtcagccaacgcggcgagttcagcggactccgacgagaagagccagagcgaagaagaaattactcgtcaacaggcggcaggagcacttgagcgaaatatcgaactggaatccaaaggattagcttcacggggtgaccgcagcattcctggtctcaatgaacagtgtgtgctagtagaccatagagaaaggaatacggacactttgggtttacaggtaggcaagagagtgtgctccaccttcaagtcggagaaggtggtggtggaagacaccgtccctattataccaaaggagaaacacgcccacgaggaggactcgagcatagactatgacttaagccccacggacacagctgcccacgaagattatgtgaccacaagattgtgacccttggaggagtgtttaccatacctatacatattttccatagtgctctgggcaggcaaaatgtttgaaatcccattatcaaatgctaatttccactttctaatgtttatctgttgtggcatattaacctgtaatatgtttgaacaaagcagaagtaatatgaaccctcctcttttgtagcctgcttttgctttcaccgttgattttacaagtgtttctgttaaataaacgcaccttttatccttgtactgttacaataacccacagaaaatttttagctatctttttcaattaaaaccaatgcaattgttttcaaaaaaaaaaaaaaaaaa